United States Patent Application Publication US 2010/0120628 A1 - sequence listing, part 7

SEQ ID NO: 12693 - DNA, 4021 bp, Homo sapiens
gctgttctctccagcgcggctcttcccgacctcgcgatcctgtcccctgcccgggcccccagccgcccgctggtcccatatattacagcagcgacagaaatatggtagtggtcgccacgttagggtccgtgggggcctcctgaggcagcctggtgccaacccgcacgcccaggctggggctcatcctggccctgcccacctcggggtcggaactacggtgggcctgggatgggggcgtcaagcactttcgcgccgtatccctccgccccccttcccgacaccctcgcggcgagcggttcttgccgcatcctgcgcagcccctgcctactttggtgcagaggcgtggggggcgggacgcgtctttcccgttcggatcgcggggaaagcagtggctccaagtgagccagaggagagctgaggagaggagggggaggccgacgacctgggccctgggcctctgaaggtctggcgtattctgacaggacacagtgagcgtctgtagaggagaggcttgaaataaaggagcacgaatattgcctggatttctggaggcctactttaaggctggccaattctgcaagaaaggcaaggaggaggagactggctcacagctctggaggacccccttctgtcagctgtggggcttgacaccacttgaacaagaaaaggagggggaaactgcaccacatcagtgaaggaggcagccggtccagagagactttctcaaagcccagctgtcccacctagcattcaacatcagtcgcactgcatacgtctcatacaattggaagagactcaaagcctcatttcattctctctccctagatccacctccagtggctgctctgctggtggtggagttgctgctgacaaccaccctcaacgggtctgcacccatccaggaaatatctgtcttcctttagcttggttgtacctgttctcactctatctgtattattgaattattgactgagactgtgtttgggaaggaggctgagtgactactggactggatattgactctaactcttattcccaagcttatatccttaatcacctaaagatcagagtgtgaagaaacaaacctgtgacagatctgtggttgaggtttagactacgggaggagtatattacctgactttctttgtaacttgtaccatgactggggcagagattgagcctagtgcccaggccaagcctgaaaagaaggctggggaagaggttatcgctgggcctgagagagagaatgatgtccctctggtggtcagacccaaggttaggacccaggcaactactggggcaaggcccaaaactgagaccaagtctgtgcctgcggcaaggcccaaaactgaggcccaagcaatgtctggggcaaggcccaaaactgaggtccaagtaatgggtggtgcaagacccaaaacggaggctcaaggaatcacaggggccaggcccaaaaccgatgccagggcagtaggtggcgctcgttctaaaactgatgccaaggcaatccctggagcaaggcccaaggatgaggcccaggcatgggcccagagtgaatttgggactgaagcagtgtcacaggcagaaggagtgtcccagactaatgccgttgcttggccactggccactgctgagtctggatcagttactaaatctaagggcctgtctatggatagagaactagtcaatgtggatgctgaaacctttcctggcacccagggtcagaaaggaatccagccctggtttggaccaggggaggagactaatatggggtcttggtgctattccaggcccagggccagagaggaggcctctaatgagtctgggttctggtcagcagatgagacctctacagcgtcttctttctggactggagaagagacaagtgtcagatcatggcccagggaagagtccaataccaggtccaggcacagggctaaacatcagactaatcccaggtccaggcccagatccaagcaagaagcctatgttgattcctggtctggatctgaggatgaggccagcaacccattctccttctgggttggagaaaataccaataacttgttcaggcccagagtcagggaggaggcaaatatcaggtccaagctcaggacaaatagagaagattgttttgaatctgagtctgaagatgagttctataagcagtcctgggttttgcctggagaagaggccaatagtagattcaggcacagagacaaagaagatcctaatactgccttgaaactcagggcccagaaagatgttgacagtgatagggtcaaacaagaacccaggtttgaggaggaagtcattattgggtcctggttctgggcagaaaaagaggccagtttggagggtggagcttcagcaatctgtgaatctgagccaggaactgaggagggggccattggcggatccgcgtactgggctgaggaaaagtccagtttgggggctgtggccagagaagaggccaagccggagtctgaagaagaggccatatttgggtcctggttctgggacagagatgaggcctgctttgacctaaatccctgtcctgtgtacaaggtcagtgataggttcagagatgcagctgaggagcttaatgcatcctccaggccccaaacctgggacgaggtcactgttgaattcaaacctggtctttttcatggggttggcttccgatccacaagcccctttggaattcccgaagaggcttctgaaatgcttgaggcaaagcccaagaacctggaacttagcccagaaggagaagagcaggaatctttgcttcagcctgatcagcctagtcctgagttcacatttcagtatgatccttcctaccggtcagtccgggaaattcgagagcatcttagggccagggagagtgcagagtctgagagttggtcctgcagctgcatacaatgtgagctgaaaattggttctgaagagtttgaagaattccttttattaatggacaaaattcgggatccttttattcatgaaatatctaaaattgcaatgggtatgagaagtgcttctcaatttacccgagatttcattcgagattcaggtgttgtctcacttattgaaaccttgcttaattatccatcctctagagttaggacaagttttttggaaaatatgattcacatggctccaccttatccaaatctaaacatgattgagacattcatatgtcaagtgtgtgaggaaacccttgcacatagtgtggattcccttgagcagctgactggaataaggatgcttagacacctcactatgactattgactatcacacactgattgccaactatatgtccgggtttctctccttattaaccacagccaatgcgagaacgaagtttcacgttctgaaaatgctattgaatttgtctgaaaatcctgctgtggcaaaaaaactattcagtgccaaagctctttcaatatttgtgggtctctttaacatagaagagacaaatgataatattcaaattgttattaaaatgtttcagaatatcagtaacattataaaaagtggaaagatgtccttaattgatgatgatttcagtcttgagccgcttatttctgcatttcgtgaatttgaggagttagctaagcaactacaagcccaaatagacaaccaaaatgatcctgaggtgggacaacaaagttaatatgattaaccacctgccgctgatcagccttatgttcccaaagagccctgagtagtgctttggtgttcacagtctgtttttttgttgtaacttatattttttaatgctgatgttaactttgtcaaactcttgttttgagctggatcattttgtggatgccaaatgaatatcaaaactgaaaacacatttgttgatatttgtcttgctgtccagattgcggtatttttcagtattaagttttcaatgaactgtgtcacctaagtaagctaccctgctattcgttgtttaaatatatggttctctatttgagtctgtgttttcaataaagttctatgttaaaattggc

SEQ ID NO: 12694 - protein, 838 aa, Homo sapiens; identical to SEQ ID NO: 2191

SEQ ID NO: 12695 - DNA, 861 bp, Homo sapiens
gctgttctctccagcgcggctcttcccgacctcgcgatcctgtcccctgcccgggcccccagccgcccgctggtcccatatattacagcagcgacagaaatatggtagtggtcgccacgttagggtccgtgggggcctcctgaggcagcctggtgccaacccgcacgcccaggctggggctcatcctggccctgcccacctcggggtcggaactacggtgggcctgggatgggggcgtcaagcactttcgcgccgtatccctccgccccccttcccgacaccctcgcggcgagcggttcttgccgcatcctgcgcagcccctgcctactttggtgcagaggcgtggggggcgggacgcgtctttcccgttcggatcgcggggaaagcagtggctccaagtgagccagaggagagctgaggagaggagggggaggccgacgacctgggccctgggcctctgaaggtctggcgtattctgacaggacacagtgagcgtctgtagaggagaggcttgaaataaaggagcacgaatattgcctggatttctggaggcctactttaaggctggccaattctgcaagaaaggcaaggaggaggagactggctcacagctctggaggacccccttctgtcagctgtggggcttgacaccacttgaacaagaaaaggagggggaaactgcaccacatcagtgaagccgagtggtcctccagagcaaaggccagccttccttccagctgtctggccaaggagcttcaggatcttctagcaagcaccccagaggcagaagactgtcatccatggtacaggactgcggcgaacaagctgactgcgcagtcacgtggggctgacggtgggtca

SEQ ID NO: 12696 - protein, 57 aa, Homo sapiens; identical to SEQ ID NO: 12688

SEQ ID NO: 12697 - DNA, 3719 bp, Homo sapiens
agcagcgacagaaatatggtagtggtcgccacgttagggtccgtgggggcctcctgaggcagcctggtgccaacccgcacgcccaggctggggctcatcctggccctgcccacctcggggtcggaactacggtgggcctgggatgggggcgtcaagcactttcgcgccgtatccctccgccccccttcccgacaccctcgcggcgagcggttcttgccgcatcctgcgcagcccctgcctactttggtgcagaggcgtggggggcgggacgcgtctttcccgttcggatcgcggggaaagcagtggctccaagtgagccagaggagagctgaggagaggagggggaggccgacgacctgggccctgggcctctgaaggcctactttaaggctggccaattctgcaagaaaggcaaggaggaggagactggctcacagctctggaggacccccttctgtcagctgtggggcttgacaccacttgaacaagaaaaggagggggaaactgcaccacatcagtgaagatccacctccagtggctgctctgctggtggtggagttgctgctgacaaccaccctcaacgggtctgcacccatccaggaaatatctgtcttcctttagcttggttgtacctgttctcactctatctgtattattgaattattgactgagactgtgtttgggaaggaggctgagtgactactggactggatattgactctaactcttattcccaagcttatatccttaatcacctaaagatcagagtgtgaagaaacaaacctgtgacagatctgtggttgaggtttagactacgggaggagtatattacctgactttctttgtaacttgtaccatgactggggcagagattgagcctagtgcccaggccaagcctgaaaagaaggctggggaagaggttatcgctgggcctgagagagagaatgatgtccctctggtggtcagacccaaggttaggacccaggcaactactggggcaaggcccaaaactgagaccaagtctgtgcctgcggcaaggcccaaaactgaggcccaagcaatgtctggggcaaggcccaaaactgaggtccaagtaatgggtggtgcaagacccaaaacggaggctcaaggaatcacaggggccaggcccaaaaccgatgccagggcagtaggtggcgctcgttctaaaactgatgccaaggcaatccctggagcaaggcccaaggatgaggcccaggcatgggcccagagtgaatttgggactgaagcagtgtcacaggcagaaggagtgtcccagactaatgccgttgcttggccactggccactgctgagtctggatcagttactaaatctaagggcctgtctatggatagagaactagtcaatgtggatgctgaaacctttcctggcacccagggtcagaaaggaatccagccctggtttggaccaggggaggagactaatatggggtcttggtgctattccaggcccagggccagagaggaggcctctaatgagtctgggttctggtcagcagatgagacctctacagcgtcttctttctggactggagaagagacaagtgtcagatcatggcccagggaagagtccaataccaggtccaggcacagggctaaacatcagactaatcccaggtccaggcccagatccaagcaagaagcctatgttgattcctggtctggatctgaggatgaggccagcaacccattctccttctgggttggagaaaataccaataacttgttcaggcccagagtcagggaggaggcaaatatcaggtccaagctcaggacaaatagagaagattgttttgaatctgagtctgaagatgagttctataagcagtcctgggttttgcctggagaagaggccaatagtagattcaggcacagagacaaagaagatcctaatactgccttgaaactcagggcccagaaagatgttgacagtgatagggtcaaacaagaacccaggtttgaggaggaagtcattattgggtcctggttctgggcagaaaaagaggccagtttggagggtggagcttcagcaatctgtgaatctgagccaggaactgaggagggggccattggcggatccgcgtactgggctgaggaaaagtccagtttgggggctgtggccagagaagaggccaagccggagtctgaagaagaggccatatttgggtcctggttctgggacagagatgaggcctgctttgacctaaatccctgtcctgtgtacaaggtcagtgataggttcagagatgcagctgaggagcttaatgcatcctccaggccccaaacctgggacgaggtcactgttgaattcaaacctggtctttttcatggggttggcttccgatccacaagcccctttggaattcccgaagaggcttctgaaatgcttgaggcaaagcccaagaacctggaacttagcccagaaggagaagagcaggaatctttgcttcagcctgatcagcctagtcctgagttcacatttcagtatgatccttcctaccggtcagtccgggaaattcgagagcatcttagggccagggagagtgcagagtctgagagttggtcctgcagctgcatacaatgtgagctgaaaattggttctgaagagtttgaagaattccttttattaatggacaaaattcgggatccttttattcatgaaatatctaaaattgcaatgggtatgagaagtgcttctcaatttacccgagatttcattcgagattcaggtgttgtctcacttattgaaaccttgcttaattatccatcctctagagttaggacaagttttttggaaaatatgattcacatggctccaccttatccaaatctaaacatgattgagacattcatatgtcaagtgtgtgaggaaacccttgcacatagtgtggattcccttgagcagctgactggaataaggatgcttagacacctcactatgactattgactatcacacactgattgccaactatatgtccgggtttctctccttattaaccacagccaatgcgagaacgaagtttcacgttctgaaaatgctattgaatttgtctgaaaatcctgctgtggcaaaaaaactattcagtgccaaagctctttcaatatttgtgggtctctttaacatagaagagacaaatgataatattcaaattgttattaaaatgtttcagaatatcagtaacattataaaaagtggaaagatgtccttaattgatgatgatttcagtcttgagccgcttatttctgcatttcgtgaatttgaggagttagctaagcaactacaagcccaaatagacaaccaaaatgatcctgaggtgggacaacaaagttaatatgattaaccacctgccgctgatcagccttatgttcccaaagagccctgagtagtgctttggtgttcacagtctgtttttttgttgtaacttatattttttaatgctgatgttaactttgtcaaactcttgttttgagctggatcattttgtggatgccaaatgaatatcaaaactgaaaacacatttgttgatatttgtcttgctgtccagattgcggtatttttcagtattaagttttcaatgaactgtgtcacctaagtaagctaccctgctattcgttgtttaaatatatggttctctatttgagtctgtgttttcaataaagttctatgttaaaattggc

SEQ ID NO: 12698 - protein, 838 aa, Homo sapiens; identical to SEQ ID NO: 2191

SEQ ID NO: 12699 - DNA, 3678 bp, Homo sapiens
gtatccctccgccccccttcccgacaccctcgcggcgagcggttcttgccgcatcctgcgcagcccctgcctactttggtgcagaggcgtggggggcgggacgcgtctttcccgttcggatcgcggggaaagcagtggctccaagtgagccagaggagagctgaggagaggagggggaggccgacgacctgggccctgggcctctgaaggctccaggttgatgtcaaagtcttgtgtctgtgcggtaggtctggcgtattctgacaggacacagtgagcgtctgtagaggagaggcttgaaataaaggagcacgaatattgcctggatttctggaggcctactttaaggctggccaattctgcaagaaaggcaaggaggaggagactggctcacagctctggaggacccccttctgtcagctgtggggcttgacaccacttgaacaagaaaaggagggggaaactgcaccacatcagtgaagatccacctccagtggctgctctgctggtggtggagttgctgctgacaaccaccctcaacgggtctgcacccatccaggaaatatctgtcttcctttagcttggttgtacctgttctcactctatctgtattattgaattattgactgagactgtgtttgggaaggaggctgagtgactactggactggatattgactctaactcttattcccaagcttatatccttaatcacctaaagatcagagtgtgaagaaacaaacctgtgacagatctgtggttgaggtttagactacgggaggagtatattacctgactttctttgtaacttgtaccatgactggggcagagattgagcctagtgcccaggccaagcctgaaaagaaggctggggaagaggttatcgctgggcctgagagagagaatgatgtccctctggtggtcagacccaaggttaggacccaggcaactactggggcaaggcccaaaactgagaccaagtctgtgcctgcggcaaggcccaaaactgaggcccaagcaatgtctggggcaaggcccaaaactgaggtccaagtaatgggtggtgcaagacccaaaacggaggctcaaggaatcacaggggccaggcccaaaaccgatgccagggcagtaggtggcgctcgttctaaaactgatgccaaggcaatccctggagcaaggcccaaggatgaggcccaggcatgggcccagagtgaatttgggactgaagcagtgtcacaggcagaaggagtgtcccagactaatgccgttgcttggccactggccactgctgagtctggatcagttactaaatctaagggcctgtctatggatagagaactagtcaatgtggatgctgaaacctttcctggcacccagggtcagaaaggaatccagccctggtttggaccaggggaggagactaatatggggtcttggtgctattccaggcccagggccagagaggaggcctctaatgagtctgggttctggtcagcagatgagacctctacagcgtcttctttctggactggagaagagacaagtgtcagatcatggcccagggaagagtccaataccaggtccaggcacagggctaaacatcagactaatcccaggtccaggcccagatccaagcaagaagcctatgttgattcctggtctggatctgaggatgaggccagcaacccattctccttctgggttggagaaaataccaataacttgttcaggcccagagtcagggaggaggcaaatatcaggtccaagctcaggacaaatagagaagattgttttgaatctgagtctgaagatgagttctataagcagtcctgggttttgcctggagaagaggccaatagtagattcaggcacagagacaaagaagatcctaatactgccttgaaactcagggcccagaaagatgttgacagtgatagggtcaaacaagaacccaggtttgaggaggaagtcattattgggtcctggttctgggcagaaaaagaggccagtttggagggtggagcttcagcaatctgtgaatctgagccaggaactgaggagggggccattggcggatccgcgtactgggctgaggaaaagtccagtttgggggctgtggccagagaagaggccaagccggagtctgaagaagaggccatatttgggtcctggttctgggacagagatgaggcctgctttgacctaaatccctgtcctgtgtacaaggtcagtgataggttcagagatgcagctgaggagcttaatgcatcctccaggccccaaacctgggacgaggtcactgttgaattcaaacctggtctttttcatggggttggcttccgatccacaagcccctttggaattcccgaagaggcttctgaaatgcttgaggcaaagcccaagaacctggaacttagcccagaaggagaagagcaggaatctttgcttcagcctgatcagcctagtcctgagttcacatttcagtatgatccttcctaccggtcagtccgggaaattcgagagcatcttagggccagggagagtgcagagtctgagagttggtcctgcagctgcatacaatgtgagctgaaaattggttctgaagagtttgaagaattccttttattaatggacaaaattcgggatccttttattcatgaaatatctaaaattgcaatgggtatgagaagtgcttctcaatttacccgagatttcattcgagattcaggtgttgtctcacttattgaaaccttgcttaattatccatcctctagagttaggacaagttttttggaaaatatgattcacatggctccaccttatccaaatctaaacatgattgagacattcatatgtcaagtgtgtgaggaaacccttgcacatagtgtggattcccttgagcagctgactggaataaggatgcttagacacctcactatgactattgactatcacacactgattgccaactatatgtccgggtttctctccttattaaccacagccaatgcgagaacgaagtttcacgttctgaaaatgctattgaatttgtctgaaaatcctgctgtggcaaaaaaactattcagtgccaaagctctttcaatatttgtgggtctctttaacatagaagagacaaatgataatattcaaattgttattaaaatgtttcagaatatcagtaacattataaaaagtggaaagatgtccttaattgatgatgatttcagtcttgagccgcttatttctgcatttcgtgaatttgaggagttagctaagcaactacaagcccaaatagacaaccaaaatgatcctgaggtgggacaacaaagttaatatgattaaccacctgccgctgatcagccttatgttcccaaagagccctgagtagtgctttggtgttcacagtctgtttttttgttgtaacttatattttttaatgctgatgttaactttgtcaaactcttgttttgagctggatcattttgtggatgccaaatgaatatcaaaactgaaaacacatttgttgatatttgtcttgctgtccagattgcggtatttttcagtattaagttttcaatgaactgtgtcacctaagtaagctaccctgctattcgttgtttaaatatatggttctctatttgagtctgtgttttcaataaagttctatgttaaaattggc

SEQ ID NO: 12700 - protein, 838 aa, Homo sapiens; identical to SEQ ID NO: 2191

SEQ ID NO: 12701 - DNA, 4197 bp, Homo sapiens
cccgacaccctcgcggcgagcggttcttgccgcatcctgcgcagcccctgcctactttggtgcagaggcgtggggggcgggacgcgtctttcccgttcggatcgcggggaaagcagtggctccaagtgagccagaggagagctgaggagaggagggggaggccgacgacctgggccctgggcctctgaaggcaagtgcgggtgcatgaggtgggggtccgggttgcgggggtggtctggcagggtggaccagcaggcagcctgccccgcggaccctgacagcctggcaacgaggagacgatccggtcggagccaggcgcttgagagaggtgcgcagtgcccgagacccctggcgatggggaggcggtgaccggagcgggcctggccaagggctgaggggctggctcgggaggcaccgccagatcgtttggaggagaaccgcgctgaccgcttcccagccagctttgcaggcgcccgcgccccgccctcgacggtgtctgtgcccggagagggctgtgggggaggctcctgcgggagaaatggcggagcgggagccgctgtgggggcgcccgggaaggccgttggggggcgcccggcgaggccggcgggggtcggcgtcccggctctgtacccagtccgccggaggtgagccgcgtttgctactccgggtcccgattcccgaaaggggcctgtggggccccatgtcctcggtgccttcccttcccacaggctccaggttgatgtcaaagtcttgtgtctgtgcggtaggtctggcgtattctgacaggacacagtgagcgtctgtagaggagaggcttgaaataaaggagcacgaatattgcctggatttctggaggcctactttaaggctggccaattctgcaagaaaggcaaggaggaggagactggctcacagctctggaggacccccttctgtcagctgtggggcttgacaccacttgaacaagaaaaggagggggaaactgcaccacatcagtgaagatccacctccagtggctgctctgctggtggtggagttgctgctgacaaccaccctcaacgggtctgcacccatccaggaaatatctgtcttcctttagcttggttgtacctgttctcactctatctgtattattgaattattgactgagactgtgtttgggaaggaggctgagtgactactggactggatattgactctaactcttattcccaagcttatatccttaatcacctaaagatcagagtgtgaagaaacaaacctgtgacagatctgtggttgaggtttagactacgggaggagtatattacctgactttctttgtaacttgtaccatgactggggcagagattgagcctagtgcccaggccaagcctgaaaagaaggctggggaagaggttatcgctgggcctgagagagagaatgatgtccctctggtggtcagacccaaggttaggacccaggcaactactggggcaaggcccaaaactgagaccaagtctgtgcctgcggcaaggcccaaaactgaggcccaagcaatgtctggggcaaggcccaaaactgaggtccaagtaatgggtggtgcaagacccaaaacggaggctcaaggaatcacaggggccaggcccaaaaccgatgccagggcagtaggtggcgctcgttctaaaactgatgccaaggcaatccctggagcaaggcccaaggatgaggcccaggcatgggcccagagtgaatttgggactgaagcagtgtcacaggcagaaggagtgtcccagactaatgccgttgcttggccactggccactgctgagtctggatcagttactaaatctaagggcctgtctatggatagagaactagtcaatgtggatgctgaaacctttcctggcacccagggtcagaaaggaatccagccctggtttggaccaggggaggagactaatatggggtcttggtgctattccaggcccagggccagagaggaggcctctaatgagtctgggttctggtcagcagatgagacctctacagcgtcttctttctggactggagaagagacaagtgtcagatcatggcccagggaagagtccaataccaggtccaggcacagggctaaacatcagactaatcccaggtccaggcccagatccaagcaagaagcctatgttgattcctggtctggatctgaggatgaggccagcaacccattctccttctgggttggagaaaataccaataacttgttcaggcccagagtcagggaggaggcaaatatcaggtccaagctcaggacaaatagagaagattgttttgaatctgagtctgaagatgagttctataagcagtcctgggttttgcctggagaagaggccaatagtagattcaggcacagagacaaagaagatcctaatactgccttgaaactcagggcccagaaagatgttgacagtgatagggtcaaacaagaacccaggtttgaggaggaagtcattattgggtcctggttctgggcagaaaaagaggccagtttggagggtggagcttcagcaatctgtgaatctgagccaggaactgaggagggggccattggcggatccgcgtactgggctgaggaaaagtccagtttgggggctgtggccagagaagaggccaagccggagtctgaagaagaggccatatttgggtcctggttctgggacagagatgaggcctgctttgacctaaatccctgtcctgtgtacaaggtcagtgataggttcagagatgcagctgaggagcttaatgcatcctccaggccccaaacctgggacgaggtcactgttgaattcaaacctggtctttttcatggggttggcttccgatccacaagcccctttggaattcccgaagaggcttctgaaatgcttgaggcaaagcccaagaacctggaacttagcccagaaggagaagagcaggaatctttgcttcagcctgatcagcctagtcctgagttcacatttcagtatgatccttcctaccggtcagtccgggaaattcgagagcatcttagggccagggagagtgcagagtctgagagttggtcctgcagctgcatacaatgtgagctgaaaattggttctgaagagtttgaagaattccttttattaatggacaaaattcgggatccttttattcatgaaatatctaaaattgcaatgggtatgagaagtgcttctcaatttacccgagatttcattcgagattcaggtgttgtctcacttattgaaaccttgcttaattatccatcctctagagttaggacaagttttttggaaaatatgattcacatggctccaccttatccaaatctaaacatgattgagacattcatatgtcaagtgtgtgaggaaacccttgcacatagtgtggattcccttgagcagctgactggaataaggatgcttagacacctcactatgactattgactatcacacactgattgccaactatatgtccgggtttctctccttattaaccacagccaatgcgagaacgaagtttcacgttctgaaaatgctattgaatttgtctgaaaatcctgctgtggcaaaaaaactattcagtgccaaagctctttcaatatttgtgggtctctttaacatagaagagacaaatgataatattcaaattgttattaaaatgtttcagaatatcagtaacattataaaaagtggaaagatgtccttaattgatgatgatttcagtcttgagccgcttatttctgcatttcgtgaatttgaggagttagctaagcaactacaagcccaaatagacaaccaaaatgatcctgaggtgggacaacaaagttaatatgattaaccacctgccgctgatcagccttatgttcccaaagagccctgagtagtgctttggtgttcacagtctgtttttttgttgtaacttatattttttaatgctgatgttaactttgtcaaactcttgttttgagctggatcattttgtggatgccaaatgaatatcaaaactgaaaacacatttgttgatatttgtcttgctgtccagattgcggtatttttcagtattaagttttcaatgaactgtgtcacctaagtaagctaccctgctattcgttgtttaaatatatggttctctatttgagtctgtgttttcaataaagttctatgttaaaattggc

SEQ ID NO: 12702 - protein, 838 aa, Homo sapiens; identical to SEQ ID NO: 2191

SEQ ID NO: 12703 - DNA, 4073 bp, Homo sapiens
ccgacaccctcgcggcgagcggttcttgccgcatcctgcgcagcccctgcctactttggtgcagaggcgtggggggcgggacgcgtctttcccgttcggatcgcggggaaagcagtggctccaagtgagccagaggagagctgaggagaggagggggaggccgacgacctgggccctgggcctctgaaggcaagtgcgggtgcatgaggtgggggtccgggttgcgggggtggtctggcagggtggaccagcaggcagcctgccccgcggaccctgacagcctggcaacgaggagacgatccggtcggagccaggcgcttgagagaggtgcgcagtgcccgagacccctggcgatggggaggcggtgaccggagcgggcctggccaagggctgaggggctggctcgggaggcaccgccagatcgtttggaggagaaccgcgctgaccgcttcccagccagctttgcaggcgcccgcgccccgccctcgacggtgtctgtgcccggagagggctgtgggggaggctcctgcgggagaaatggcggagcgggagccgctgtgggggcgcccgggaaggccgttggggggcgcccggcgaggccggcgggggtcggcgtcccggctctgtacccagtccgccggaggtctggcgtattctgacaggacacagtgagcgtctgtagaggagaggcttgaaataaaggagcacgaatattgcctggatttctggaggcctactttaaggctggccaattctgcaagaaaggcaaggaggaggagactggctcacagctctggaggacccccttctgtcagctgtggggcttgacaccacttgaacaagaaaaggagggggaaactgcaccacatcagtgaagatccacctccagtggctgctctgctggtggtggagttgctgctgacaaccaccctcaacgggtctgcacccatccaggaaatatctgtcttcctttagcttggttgtacctgttctcactctatctgtattattgaattattgactgagactgtgtttgggaaggaggctgagtgactactggactggatattgactctaactcttattcccaagcttatatccttaatcacctaaagatcagagtgtgaagaaacaaacctgtgacagatctgtggttgaggtttagactacgggaggagtatattacctgactttctttgtaacttgtaccatgactggggcagagattgagcctagtgcccaggccaagcctgaaaagaaggctggggaagaggttatcgctgggcctgagagagagaatgatgtccctctggtggtcagacccaaggttaggacccaggcaactactggggcaaggcccaaaactgagaccaagtctgtgcctgcggcaaggcccaaaactgaggcccaagcaatgtctggggcaaggcccaaaactgaggtccaagtaatgggtggtgcaagacccaaaacggaggctcaaggaatcacaggggccaggcccaaaaccgatgccagggcagtaggtggcgctcgttctaaaactgatgccaaggcaatccctggagcaaggcccaaggatgaggcccaggcatgggcccagagtgaatttgggactgaagcagtgtcacaggcagaaggagtgtcccagactaatgccgttgcttggccactggccactgctgagtctggatcagttactaaatctaagggcctgtctatggatagagaactagtcaatgtggatgctgaaacctttcctggcacccagggtcagaaaggaatccagccctggtttggaccaggggaggagactaatatggggtcttggtgctattccaggcccagggccagagaggaggcctctaatgagtctgggttctggtcagcagatgagacctctacagcgtcttctttctggactggagaagagacaagtgtcagatcatggcccagggaagagtccaataccaggtccaggcacagggctaaacatcagactaatcccaggtccaggcccagatccaagcaagaagcctatgttgattcctggtctggatctgaggatgaggccagcaacccattctccttctgggttggagaaaataccaataacttgttcaggcccagagtcagggaggaggcaaatatcaggtccaagctcaggacaaatagagaagattgttttgaatctgagtctgaagatgagttctataagcagtcctgggttttgcctggagaagaggccaatagtagattcaggcacagagacaaagaagatcctaatactgccttgaaactcagggcccagaaagatgttgacagtgatagggtcaaacaagaacccaggtttgaggaggaagtcattattgggtcctggttctgggcagaaaaagaggccagtttggagggtggagcttcagcaatctgtgaatctgagccaggaactgaggagggggccattggcggatccgcgtactgggctgaggaaaagtccagtttgggggctgtggccagagaagaggccaagccggagtctgaagaagaggccatatttgggtcctggttctgggacagagatgaggcctgctttgacctaaatccctgtcctgtgtacaaggtcagtgataggttcagagatgcagctgaggagcttaatgcatcctccaggccccaaacctgggacgaggtcactgttgaattcaaacctggtctttttcatggggttggcttccgatccacaagcccctttggaattcccgaagaggcttctgaaatgcttgaggcaaagcccaagaacctggaacttagcccagaaggagaagagcaggaatctttgcttcagcctgatcagcctagtcctgagttcacatttcagtatgatccttcctaccggtcagtccgggaaattcgagagcatcttagggccagggagagtgcagagtctgagagttggtcctgcagctgcatacaatgtgagctgaaaattggttctgaagagtttgaagaattccttttattaatggacaaaattcgggatccttttattcatgaaatatctaaaattgcaatgggtatgagaagtgcttctcaatttacccgagatttcattcgagattcaggtgttgtctcacttattgaaaccttgcttaattatccatcctctagagttaggacaagttttttggaaaatatgattcacatggctccaccttatccaaatctaaacatgattgagacattcatatgtcaagtgtgtgaggaaacccttgcacatagtgtggattcccttgagcagctgactggaataaggatgcttagacacctcactatgactattgactatcacacactgattgccaactatatgtccgggtttctctccttattaaccacagccaatgcgagaacgaagtttcacgttctgaaaatgctattgaatttgtctgaaaatcctgctgtggcaaaaaaactattcagtgccaaagctctttcaatatttgtgggtctctttaacatagaagagacaaatgataatattcaaattgttattaaaatgtttcagaatatcagtaacattataaaaagtggaaagatgtccttaattgatgatgatttcagtcttgagccgcttatttctgcatttcgtgaatttgaggagttagctaagcaactacaagcccaaatagacaaccaaaatgatcctgaggtgggacaacaaagttaatatgattaaccacctgccgctgatcagccttatgttcccaaagagccctgagtagtgctttggtgttcacagtctgtttttttgttgtaacttatattttttaatgctgatgttaactttgtcaaactcttgttttgagctggatcattttgtggatgccaaatgaatatcaaaactgaaaacacatttgttgatatttgtcttgctgtccagattgcggtatttttcagtattaagttttcaatgaactgtgtcacctaagtaagctaccctgctattcgttgtttaaatatatggttctctatttgagtctgtgttttcaataaagttctatgttaaaattggc

SEQ ID NO: 12704 - protein, 44 aa, Homo sapiens
MAEREPLWGRPGRPLGGARRGRRGSASRLCTQSAGGLAYSDRTQ

SEQ ID NO: 12705 - DNA, 3985 bp, Homo sapiens
ccgacaccctcgcggcgagcggttcttgccgcatcctgcgcagcccctgcctactttggtgcagaggcgtggggggcgggacgcgtctttcccgttcggatcgcggggaaagcagtggctccaagtgagccagaggagagctgaggagaggagggggaggccgacgacctgggccctgggcctctgaaggcaagtgcgggtgcatgaggtgggggtccgggttgcgggggtggtctggcagggtggaccagcaggcagcctgccccgcggaccctgacagcctggcaacgaggagacgatccggtcggagccaggcgcttgagagaggtgcgcagtgcccgagacccctggcgatggggaggcggtgaccggagcgggcctggccaagggctgaggggctggctcgggaggcaccgccagatcgtttggaggagaaccgcgctgaccgcttcccagccagctttgcaggcgcccgcgccccgccctcgacggtgtctgtgcccggagagggctgtgggggaggctcctgcgggagaaatggcggagcgggagccgctgtgggggcgcccgggaaggccgttggggggcgcccggcgaggccggcgggggtcggcgtcccggctctgtacccagtccgccggaggcctactttaaggctggccaattctgcaagaaaggcaaggaggaggagactggctcacagctctggaggacccccttctgtcagctgtggggcttgacaccacttgaacaagaaaaggagggggaaactgcaccacatcagtgaagatccacctccagtggctgctctgctggtggtggagttgctgctgacaaccaccctcaacgggtctgcacccatccaggaaatatctgtcttcctttagcttggttgtacctgttctcactctatctgtattattgaattattgactgagactgtgtttgggaaggaggctgagtgactactggactggatattgactctaactcttattcccaagcttatatccttaatcacctaaagatcagagtgtgaagaaacaaacctgtgacagatctgtggttgaggtttagactacgggaggagtatattacctgactttctttgtaacttgtaccatgactggggcagagattgagcctagtgcccaggccaagcctgaaaagaaggctggggaagaggttatcgctgggcctgagagagagaatgatgtccctctggtggtcagacccaaggttaggacccaggcaactactggggcaaggcccaaaactgagaccaagtctgtgcctgcggcaaggcccaaaactgaggcccaagcaatgtctggggcaaggcccaaaactgaggtccaagtaatgggtggtgcaagacccaaaacggaggctcaaggaatcacaggggccaggcccaaaaccgatgccagggcagtaggtggcgctcgttctaaaactgatgccaaggcaatccctggagcaaggcccaaggatgaggcccaggcatgggcccagagtgaatttgggactgaagcagtgtcacaggcagaaggagtgtcccagactaatgccgttgcttggccactggccactgctgagtctggatcagttactaaatctaagggcctgtctatggatagagaactagtcaatgtggatgctgaaacctttcctggcacccagggtcagaaaggaatccagccctggtttggaccaggggaggagactaatatggggtcttggtgctattccaggcccagggccagagaggaggcctctaatgagtctgggttctggtcagcagatgagacctctacagcgtcttctttctggactggagaagagacaagtgtcagatcatggcccagggaagagtccaataccaggtccaggcacagggctaaacatcagactaatcccaggtccaggcccagatccaagcaagaagcctatgttgattcctggtctggatctgaggatgaggccagcaacccattctccttctgggttggagaaaataccaataacttgttcaggcccagagtcagggaggaggcaaatatcaggtccaagctcaggacaaatagagaagattgttttgaatctgagtctgaagatgagttctataagcagtcctgggttttgcctggagaagaggccaatagtagattcaggcacagagacaaagaagatcctaatactgccttgaaactcagggcccagaaagatgttgacagtgatagggtcaaacaagaacccaggtttgaggaggaagtcattattgggtcctggttctgggcagaaaaagaggccagtttggagggtggagcttcagcaatctgtgaatctgagccaggaactgaggagggggccattggcggatccgcgtactgggctgaggaaaagtccagtttgggggctgtggccagagaagaggccaagccggagtctgaagaagaggccatatttgggtcctggttctgggacagagatgaggcctgctttgacctaaatccctgtcctgtgtacaaggtcagtgataggttcagagatgcagctgaggagcttaatgcatcctccaggccccaaacctgggacgaggtcactgttgaattcaaacctggtctttttcatggggttggcttccgatccacaagcccctttggaattcccgaagaggcttctgaaatgcttgaggcaaagcccaagaacctggaacttagcccagaaggagaagagcaggaatctttgcttcagcctgatcagcctagtcctgagttcacatttcagtatgatccttcctaccggtcagtccgggaaattcgagagcatcttagggccagggagagtgcagagtctgagagttggtcctgcagctgcatacaatgtgagctgaaaattggttctgaagagtttgaagaattccttttattaatggacaaaattcgggatccttttattcatgaaatatctaaaattgcaatgggtatgagaagtgcttctcaatttacccgagatttcattcgagattcaggtgttgtctcacttattgaaaccttgcttaattatccatcctctagagttaggacaagttttttggaaaatatgattcacatggctccaccttatccaaatctaaacatgattgagacattcatatgtcaagtgtgtgaggaaacccttgcacatagtgtggattcccttgagcagctgactggaataaggatgcttagacacctcactatgactattgactatcacacactgattgccaactatatgtccgggtttctctccttattaaccacagccaatgcgagaacgaagtttcacgttctgaaaatgctattgaatttgtctgaaaatcctgctgtggcaaaaaaactattcagtgccaaagctctttcaatatttgtgggtctctttaacatagaagagacaaatgataatattcaaattgttattaaaatgtttcagaatatcagtaacattataaaaagtggaaagatgtccttaattgatgatgatttcagtcttgagccgcttatttctgcatttcgtgaatttgaggagttagctaagcaactacaagcccaaatagacaaccaaaatgatcctgaggtgggacaacaaagttaatatgattaaccacctgccgctgatcagccttatgttcccaaagagccctgagtagtgctttggtgttcacagtctgtttttttgttgtaacttatattttttaatgctgatgttaactttgtcaaactcttgttttgagctggatcattttgtggatgccaaatgaatatcaaaactgaaaacacatttgttgatatttgtcttgctgtccagattgcggtatttttcagtattaagttttcaatgaactgtgtcacctaagtaagctaccctgctattcgttgtttaaatatatggttctctatttgagtctgtgttttcaataaagttctatgttaaaattggc

SEQ ID NO: 12706 - protein, 38 aa, Homo sapiens
MAEREPLWGRPGRPLGGARRGRRGSASRLCTQSAGGLL

SEQ ID NO: 12707 - DNA, 3308 bp, Homo sapiens
ctactttggtgcagaggcgtggggggcgggacgcgtctttcccgttcggatcgcggggaaagcagtggctccaagtgagccagaggagagctgaggagaggagggggaggccgacgacctgggccctgggcctctgaaggtctggcgtattctgacaggacacagtgagcgtctgtagaggagaggcttgaaatatctgtcttcctttagcttggttgtacctgttctcactctatctgtattattgaattattgactgagactgtgtttgggaaggaggctgagtgactactggactggatattgactctaactcttattcccaagcttatatccttaatcacctaaagatcagagtgtgaagaaacaaacctgtgacagatctgtggttgaggtttagactacgggaggagtatattacctgactttctttgtaacttgtaccatgactggggcagagattgagcctagtgcccaggccaagcctgaaaagaaggctggggaagaggttatcgctgggcctgagagagagaatgatgtccctctggtggtcagacccaaggttaggacccaggcaactactggggcaaggcccaaaactgagaccaagtctgtgcctgcggcaaggcccaaaactgaggcccaagcaatgtctggggcaaggcccaaaactgaggtccaagtaatgggtggtgcaagacccaaaacggaggctcaaggaatcacaggggccaggcccaaaaccgatgccagggcagtaggtggcgctcgttctaaaactgatgccaaggcaatccctggagcaaggcccaaggatgaggcccaggcatgggcccagagtgaatttgggactgaagcagtgtcacaggcagaaggagtgtcccagactaatgccgttgcttggccactggccactgctgagtctggatcagttactaaatctaagggcctgtctatggatagagaactagtcaatgtggatgctgaaacctttcctggcacccagggtcagaaaggaatccagccctggtttggaccaggggaggagactaatatggggtcttggtgctattccaggcccagggccagagaggaggcctctaatgagtctgggttctggtcagcagatgagacctctacagcgtcttctttctggactggagaagagacaagtgtcagatcatggcccagggaagagtccaataccaggtccaggcacagggctaaacatcagactaatcccaggtccaggcccagatccaagcaagaagcctatgttgattcctggtctggatctgaggatgaggccagcaacccattctccttctgggttggagaaaataccaataacttgttcaggcccagagtcagggaggaggcaaatatcaggtccaagctcaggacaaatagagaagattgttttgaatctgagtctgaagatgagttctataagcagtcctgggttttgcctggagaagaggccaatagtagattcaggcacagagacaaagaagatcctaatactgccttgaaactcagggcccagaaagatgttgacagtgatagggtcaaacaagaacccaggtttgaggaggaagtcattattgggtcctggttctgggcagaaaaagaggccagtttggagggtggagcttcagcaatctgtgaatctgagccaggaactgaggagggggccattggcggatccgcgtactgggctgaggaaaagtccagtttgggggctgtggccagagaagaggccaagccggagtctgaagaagaggccatatttgggtcctggttctgggacagagatgaggcctgctttgacctaaatccctgtcctgtgtacaaggtcagtgataggttcagagatgcagctgaggagcttaatgcatcctccaggccccaaacctgggacgaggtcactgttgaattcaaacctggtctttttcatggggttggcttccgatccacaagcccctttggaattcccgaagaggcttctgaaatgcttgaggcaaagcccaagaacctggaacttagcccagaaggagaagagcaggaatctttgcttcagcctgatcagcctagtcctgagttcacatttcagtatgatccttcctaccggtcagtccgggaaattcgagagcatcttagggccagggagagtgcagagtctgagagttggtcctgcagctgcatacaatgtgagctgaaaattggttctgaagagtttgaagaattccttttattaatggacaaaattcgggatccttttattcatgaaatatctaaaattgcaatgggtatgagaagtgcttctcaatttacccgagatttcattcgagattcaggtgttgtctcacttattgaaaccttgcttaattatccatcctctagagttaggacaagttttttggaaaatatgattcacatggctccaccttatccaaatctaaacatgattgagacattcatatgtcaagtgtgtgaggaaacccttgcacatagtgtggattcccttgagcagctgactggaataaggatgcttagacacctcactatgactattgactatcacacactgattgccaactatatgtccgggtttctctccttattaaccacagccaatgcgagaacgaagtttcacgttctgaaaatgctattgaatttgtctgaaaatcctgctgtggcaaaaaaactattcagtgccaaagctctttcaatatttgtgggtctctttaacatagaagagacaaatgataatattcaaattgttattaaaatgtttcagaatatcagtaacattataaaaagtggaaagatgtccttaattgatgatgatttcagtcttgagccgcttatttctgcatttcgtgaatttgaggagttagctaagcaactacaagcccaaatagacaaccaaaatgatcctgaggtgggacaacaaagttaatatgattaaccacctgccgctgatcagccttatgttcccaaagagccctgagtagtgctttggtgttcacagtctgtttttttgttgtaacttatattttttaatgctgatgttaactttgtcaaactcttgttttgagctggatcattttgtggatgccaaatgaatatcaaaactgaaaacacatttgttgatatttgtcttgctgtccagattgcggtatttttcagtattaagttttcaatgaactgtgtcacctaagtaagctaccctgctattcgttgtttaaatatatggttctctatttgagtctgtgttttcaataaagttctatgttaaaattggc

SEQ ID NO: 12708 - protein, 838 aa, Homo sapiens; identical to SEQ ID NO: 2191

SEQ ID NO: 12709 - DNA, 3575 bp, Homo sapiens
gtctttcccgttcggatcgcggggaaagcagtggctccaagtgagccagaggagagctgaggagaggagggggaggccgacgacctgggccctgggcctctgaaggcctactttaaggctggccaattctgcaagaaaggcaaggaggaggagactggctcacagctctggaggacccccttctgtcagctgtggggcttgacaccacttgaacaagaaaaggagggggaaactgcaccacatcagtgaaggaggcagccggtccagagagactttctcaaagcccagctgtcccacctagcattcaacatcagtcgcactgcatacgtctcatacaattggaagagactcaaagcctcatttcattctctctccctagatccacctccagtggctgctctgctggtggtggagttgctgctgacaaccaccctcaacgggtctgcacccatccaggaaatatctgtcttcctttagcttggttgtacctgttctcactctatctgtattattgaattattgactgagactgtgtttgggaaggaggctgagtgactactggactggatattgactctaactcttattcccaagcttatatccttaatcacctaaagatcagagtgtgaagaaacaaacctgtgacagatctgtggttgaggtttagactacgggaggagtatattacctgactttctttgtaacttgtaccatgactggggcagagattgagcctagtgcccaggccaagcctgaaaagaaggctggggaagaggttatcgctgggcctgagagagagaatgatgtccctctggtggtcagacccaaggttaggacccaggcaactactggggcaaggcccaaaactgagaccaagtctgtgcctgcggcaaggcccaaaactgaggcccaagcaatgtctggggcaaggcccaaaactgaggtccaagtaatgggtggtgcaagacccaaaacggaggctcaaggaatcacaggggccaggcccaaaaccgatgccagggcagtaggtggcgctcgttctaaaactgatgccaaggcaatccctggagcaaggcccaaggatgaggcccaggcatgggcccagagtgaatttgggactgaagcagtgtcacaggcagaaggagtgtcccagactaatgccgttgcttggccactggccactgctgagtctggatcagttactaaatctaagggcctgtctatggatagagaactagtcaatgtggatgctgaaacctttcctggcacccagggtcagaaaggaatccagccctggtttggaccaggggaggagactaatatggggtcttggtgctattccaggcccagggccagagaggaggcctctaatgagtctgggttctggtcagcagatgagacctctacagcgtcttctttctggactggagaagagacaagtgtcagatcatggcccagggaagagtccaataccaggtccaggcacagggctaaacatcagactaatcccaggtccaggcccagatccaagcaagaagcctatgttgattcctggtctggatctgaggatgaggccagcaacccattctccttctgggttggagaaaataccaataacttgttcaggcccagagtcagggaggaggcaaatatcaggtccaagctcaggacaaatagagaagattgttttgaatctgagtctgaagatgagttctataagcagtcctgggttttgcctggagaagaggccaatagtagattcaggcacagagacaaagaagatcctaatactgccttgaaactcagggcccagaaagatgttgacagtgatagggtcaaacaagaacccaggtttgaggaggaagtcattattgggtcctggttctgggcagaaaaagaggccagtttggagggtggagcttcagcaatctgtgaatctgagccaggaactgaggagggggccattggcggatccgcgtactgggctgaggaaaagtccagtttgggggctgtggccagagaagaggccaagccggagtctgaagaagaggccatatttgggtcctggttctgggacagagatgaggcctgctttgacctaaatccctgtcctgtgtacaaggtcagtgataggttcagagatgcagctgaggagcttaatgcatcctccaggccccaaacctgggacgaggtcactgttgaattcaaacctggtctttttcatggggttggcttccgatccacaagcccctttggaattcccgaagaggcttctgaaatgcttgaggcaaagcccaagaacctggaacttagcccagaaggagaagagcaggaatctttgcttcagcctgatcagcctagtcctgagttcacatttcagtatgatccttcctaccggtcagtccgggaaattcgagagcatcttagggccagggagagtgcagagtctgagagttggtcctgcagctgcatacaatgtgagctgaaaattggttctgaagagtttgaagaattccttttattaatggacaaaattcgggatccttttattcatgaaatatctaaaattgcaatgggtatgagaagtgcttctcaatttacccgagatttcattcgagattcaggtgttgtctcacttattgaaaccttgcttaattatccatcctctagagttaggacaagttttttggaaaatatgattcacatggctccaccttatccaaatctaaacatgattgagacattcatatgtcaagtgtgtgaggaaacccttgcacatagtgtggattcccttgagcagctgactggaataaggatgcttagacacctcactatgactattgactatcacacactgattgccaactatatgtccgggtttctctccttattaaccacagccaatgcgagaacgaagtttcacgttctgaaaatgctattgaatttgtctgaaaatcctgctgtggcaaaaaaactattcagtgccaaagctctttcaatatttgtgggtctctttaacatagaagagacaaatgataatattcaaattgttattaaaatgtttcagaatatcagtaacattataaaaagtggaaagatgtccttaattgatgatgatttcagtcttgagccgcttatttctgcatttcgtgaatttgaggagttagctaagcaactacaagcccaaatagacaaccaaaatgatcctgaggtgggacaacaaagttaatatgattaaccacctgccgctgatcagccttatgttcccaaagagccctgagtagtgctttggtgttcacagtctgtttttttgttgtaacttatattttttaatgctgatgttaactttgtcaaactcttgttttgagctggatcattttgtggatgccaaatgaatatcaaaactgaaaacacatttgttgatatttgtcttgctgtccagattgcggtatttttcagtattaagttttcaatgaactgtgtcacctaagtaagctaccctgctattcgttgtttaaatatatggttctctatttgagtctgtgttttcaataaagttctatgttaaaattggc

SEQ ID NO: 12710 - protein, 838 aa, Homo sapiens; identical to SEQ ID NO: 2191

SEQ ID NO: 12711 - DNA, 534 bp, Homo sapiens
cccgttcggatcgcggggaaagcagtggctccaagtgagccagaggagagctgaggagaggagggggaggccgacgacctgggccctgggcctctgaaggcctactttaaggctggccaattctgcaagaaaggcaaggaggaggagactggctcacagctctggaggacccccttctgtcagctgtggggcttgacaccacttgaacaagaaaaggagggggaaactgcaccacatcagtgaagccgagtggtcctccagagcaaaggccagccttccttccagctgtctggccaaggagcttcaggatcttctagcaagcaccccagaggcagaagactgtcatccatggtacaggactgcggcgaacaagctgactgcgcagtcacgtggggctgacggtgggtcatgtgaccaggctctgcattaggcctgccgagaggagtgttttcttgcatccagaaaagacctgagaggcggacgacacctgtgctccgcagagcagaacgtgggaggaacggcgggatgttaagg

SEQ ID NO: 12712 - protein, 77 aa, Homo sapiens; identical to SEQ ID NO: 12684

SEQ ID NO: 12713 - DNA, 3967 bp, Homo sapiens
gagcgtctgtagaggagaggcttgaaataaaggagcacgaatattgcctggatttctggaggtgtgtggggatgggggttgggcgctaaacactgattggggacccgaatcggggtaggggactgtgaccagagcaagtcaggcatccaggagcacctcctaatcttcacctctctaatggcgctccccccaccttccatccccacctgtctcccccaccgtcctaaactgggggcatgaaagggtgggctttggaggtgggggtgatgagggagacatactgacaagtactaattcacaacctgttttctagaatatgcggcgcccttcccccattttatgctgcgcagagcaaggggatgtggcgcacctagtggtgaatcctcagaattggagaagggagtaatgggaagaatatgacgtcaagagaaggagttgttatctctggaaccttgaagcagggcccaaataaaacgagaatattccaccagcaaaaccccgaatgttgaaagacagataccaataatatggggactcttatccttggcgttggcctgtctaccaagtgctcttctgccaccactcatatcctgactgtcttactttttcatgtgtttgtccataggcctactttaaggctggccaattctgcaagaaaggcaaggaggaggagactggctcacagctctggaggacccccttctgtcagctgtggggcttgacaccacttgaacaagaaaaggagggggaaactgcaccacatcagtgaagatccacctccagtggctgctctgctggtggtggagttgctgctgacaaccaccctcaacgggtctgcacccatccaggaaatatctgtcttcctttagcttggttgtacctgttctcactctatctgtattattgaattattgactgagactgtgtttgggaaggaggctgagtgactactggactggatattgactctaactcttattcccaagcttatatccttaatcacctaaagatcagagtgtgaagaaacaaacctgtgacagatctgtggttgaggtttagactacgggaggagtatattacctgactttctttgtaacttgtaccatgactggggcagagattgagcctagtgcccaggccaagcctgaaaagaaggctggggaagaggttatcgctgggcctgagagagagaatgatgtccctctggtggtcagacccaaggttaggacccaggcaactactggggcaaggcccaaaactgagaccaagtctgtgcctgcggcaaggcccaaaactgaggcccaagcaatgtctggggcaaggcccaaaactgaggtccaagtaatgggtggtgcaagacccaaaacggaggctcaaggaatcacaggggccaggcccaaaaccgatgccagggcagtaggtggcgctcgttctaaaactgatgccaaggcaatccctggagcaaggcccaaggatgaggcccaggcatgggcccagagtgaatttgggactgaagcagtgtcacaggcagaaggagtgtcccagactaatgccgttgcttggccactggccactgctgagtctggatcagttactaaatctaagggcctgtctatggatagagaactagtcaatgtggatgctgaaacctttcctggcacccagggtcagaaaggaatccagccctggtttggaccaggggaggagactaatatggggtcttggtgctattccaggcccagggccagagaggaggcctctaatgagtctgggttctggtcagcagatgagacctctacagcgtcttctttctggactggagaagagacaagtgtcagatcatggcccagggaagagtccaataccaggtccaggcacagggctaaacatcagactaatcccaggtccaggcccagatccaagcaagaagcctatgttgattcctggtctggatctgaggatgaggccagcaacccattctccttctgggttggagaaaataccaataacttgttcaggcccagagtcagggaggaggcaaatatcaggtccaagctcaggacaaatagagaagattgttttgaatctgagtctgaagatgagttctataagcagtcctgggttttgcctggagaagaggccaatagtagattcaggcacagagacaaagaagatcctaatactgccttgaaactcagggcccagaaagatgttgacagtgatagggtcaaacaagaacccaggtttgaggaggaagtcattattgggtcctggttctgggcagaaaaagaggccagtttggagggtggagcttcagcaatctgtgaatctgagccaggaactgaggagggggccattggcggatccgcgtactgggctgaggaaaagtccagtttgggggctgtggccagagaagaggccaagccggagtctgaagaagaggccatatttgggtcctggttctgggacagagatgaggcctgctttgacctaaatccctgtcctgtgtacaaggtcagtgataggttcagagatgcagctgaggagcttaatgcatcctccaggccccaaacctgggacgaggtcactgttgaattcaaacctggtctttttcatggggttggcttccgatccacaagcccctttggaattcccgaagaggcttctgaaatgcttgaggcaaagcccaagaacctggaacttagcccagaaggagaagagcaggaatctttgcttcagcctgatcagcctagtcctgagttcacatttcagtatgatccttcctaccggtcagtccgggaaattcgagagcatcttagggccagggagagtgcagagtctgagagttggtcctgcagctgcatacaatgtgagctgaaaattggttctgaagagtttgaagaattccttttattaatggacaaaattcgggatccttttattcatgaaatatctaaaattgcaatgggtatgagaagtgcttctcaatttacccgagatttcattcgagattcaggtgttgtctcacttattgaaaccttgcttaattatccatcctctagagttaggacaagttttttggaaaatatgattcacatggctccaccttatccaaatctaaacatgattgagacattcatatgtcaagtgtgtgaggaaacccttgcacatagtgtggattcccttgagcagctgactggaataaggatgcttagacacctcactatgactattgactatcacacactgattgccaactatatgtccgggtttctctccttattaaccacagccaatgcgagaacgaagtttcacgttctgaaaatgctattgaatttgtctgaaaatcctgctgtggcaaaaaaactattcagtgccaaagctctttcaatatttgtgggtctctttaacatagaagagacaaatgataatattcaaattgttattaaaatgtttcagaatatcagtaacattataaaaagtggaaagatgtccttaattgatgatgatttcagtcttgagccgcttatttctgcatttcgtgaatttgaggagttagctaagcaactacaagcccaaatagacaaccaaaatgatcctgaggtgggacaacaaagttaatatgattaaccacctgccgctgatcagccttatgttcccaaagagccctgagtagtgctttggtgttcacagtctgtttttttgttgtaacttatattttttaatgctgatgttaactttgtcaaactcttgttttgagctggatcattttgtggatgccaaatgaatatcaaaactgaaaacacatttgttgatatttgtcttgctgtccagattgcggtatttttcagtattaagttttcaatgaactgtgtcacctaagtaagctaccctgctattcgttgtttaaatatatggttctctatttgagtctgtgttttcaataaagttctatgttaaaattggc

SEQ ID NO: 12714 - protein, 64 aa, Homo sapiens
MGTLILGVGLSTKCSSATTHILTVLLFHVFVHRPTLRLANSARKARRRRLAHSSGGPPSVSCGA

SEQ ID NO: 12715 - DNA, 740 bp, Homo sapiens
aagggaatccacactatgtgcaagggtttcctcacacacttgacatatgaatgtctcaatcatgtttagatttggataaggtggagccatgtgaatcatattttccaaaaaacttgtcctaactctagaggatggataattaagcaaggtttcaataagtgagacaacacctgaatctcgaatgaaatctcgggtaaattgagaagcacttctcatacccattgcaattttagatatttcatgaataaaaggatcccgaattttgtccattaataaaaggaattcttcaaactcttcagaaccaattttcagctcacattgtatgcagctgcaggaccaactctcagactctgcactctccctggccctaagatgctctcgaatttcccggactgaccggtaggaaggatcatactgaaatgtgaactcaggactaggctgatcaggctgaagcaaagattcctggctcagattcacagattgctgaagctccaccctccaaactggcctctttttctgcccagaaccaggacccaataatgacttcctcctcaaacctgggttcttgtttgaccctatcactgtcaacatctttctgggccctgagtttcaaggcagtattaggatcttctttgtctctgtgcctgaatctactattggcctcttctccaggcaaaacccaggactgcttatagaactcatcttcagactcagattcaaaacaatcttctctatttgtc

SEQ ID NO: 12716 - protein, 51 aa, Homo sapiens
MTSSSNLGSCLTLSLSTSFWALSFKAVLGSSLSLCLNLLLASSPGKTQDCL

SEQ ID NO: 12717 - DNA, 1410 bp, Homo sapiens
ttctgggacagagatgaggcctgctttgacctaaatccctgtcctgtgtacaaggtcagtgataggttcagagatgcagctgaggagcttaatgcatcctccaggccccaaacctgggacgaggtcactgttgaattcaaacctggtctttttcatggggttggcttccgatccacaagcccctttggaattcccgaagaggcttctgaaatgcttgaggcaaagcccaagaacctggaacttagcccagaaggagaagagcaggaatctttgcttcagcctgatcagcctagtcctgagttcacatttcagtatgatccttcctaccggtcagtccgggaaattcgagagcatcttagggccagggagagtgcagagtctgagagttggtcctgcagctgcatacaatgtgagctgaaaattggttctgaagagtttgaagaattccttttattaatggacaaaattcgggatccttttattcatgaaatatctaaaattgcaatgggtatgagaagtgcttctcaatttacccgagatttcattcgagattcaggtgttgtctcacttattgaaaccttgcttaattatccatcctctagagttaggacaagttttttggaaaatatgattcacatggctccaccttatccaaatctaaacatgattgagacattcatatgtcaagtgtgtgaggaaacccttgcacatagtgtggattcccttgagcagctgactggaataaggatgcttagacacctcactatgactattgactatcacacactgattgccaactatatgtccgggtttctctccttattaaccacagccaatgcgagaacgaagtttcacgttctgaaaatgctattgaatttgtctgaaaatcctgctgtggcaaaaaaactattcagtgccaaagctctttcaatatttgtgggtctctttaacatagaagagacaaatgataatattctgcatttcgtgaatttgaggagttagctaagcaactacaagcccaaatagacaaccaaaatgatcctgaggtgggacaacaaagttaatatgattaaccacctgccgctgatcagccttatgttcccaaagagccctgagtagtgctttggtgttcacagtctgtttttttgttgtaacttatattttttaatgctgatgttaactttgtcaaactcttgttttgagctggatcattttgtggatgccaaatgaatatcaaaactgaaaacacatttgttgatatttgtcttgctgtccagattgcggtatttttcagtattaagttttcaatgaactgtgtcacctaagtaagctaccctgctattcgttgtttaaatatatggttctctatttgagtctgtgttttcaataaagttctatgttaaaattggc

SEQ ID NO: 12718 - protein, 263 aa, Homo sapiens
MLEAKPKNLELSPEGEEQESLLQPDQPSPEFTFQYDPSYRSVREIREHLRARESAESESWSCSCIQCELKIGSEEFEEFLLLMDKIRDPFIHEISKIAMGMRSASQFTRDFIRDSGVVSLIETLLNYPSSRVRTSFLENMIHMAPPYPNLNMIETFICQVCEETLAHSVDSLEQLTGIRMLRHLTMTIDYHTLIANYMSGFLSLLTTANARTKFHVLKMLLNLSENPAVAKKLFSAKALSIFVGLFNIEETNDNILHFVNLRS

SEQ ID NO: 12719 - DNA, 4025 bp, Homo sapiens
aggctctgcattaggcctgccgagaggagtgttttcttgcatccagaaaagacctgagaggcggacgacacctgtgctccgcagagcagaacgtgggaggaacggcgggatgttaaggagctcaagaagcagagagtctacctgcccgacgcgttcgtggagaggagcagcggttgctgttggaggaggtctgtttctttctaggttcctgtagagatctgtatgtagctgttcacttggaagttaattaagaaagaacaaaaactattcatttggattcaaggtccatctccactggtggctgtggtggctttggattgttggaagaccatcaccttcagcaggtctgcacttgggaacaatcattctcccccagcccgagcgtgcctctgccctctgtatcattgacagaggctgtatgtttggaaagagaactttgtgactgcagaactgacagttgactctaattcttgctaccaagtttttccccgacccagtgaaagagtgttaagacttcgacctaggacacattgagaaccaaggccaagactggacagggccatataactgggcttcaaccatggctgggactaagaataagacaagagcccaggccaaaactgaaaaaaaggctgctatacaagctaaagctggagcagagagggaggctactggtgttgttaggcctgtagccaagaccagggccaaagcaaaagccaagacagggtctaagacagatgcagtagcagagatgaaggcagtgtctaagaacaaggttgttgctgagacgaaggaaggagctctgtcagagcctaagactctgggcaaagccatgggagatttcactcccaaggctgggaatgagtccaccagctccacatgtaaaaatgaggctggtactgatgcctggttctgggctggggaagaggccactatcaattcctggttctggaatggagaagaggctggtaatagtttcagcactaagaatgataaacctgaaattggtgcccaggtctgtgctgaggagttggaacctgcggctggggccgattgcaaacctaggtcaggggctgaggaggaggaggaagagaatgttattgggaactggttttgggaaggagatgatactagttttgaccctaatcctaaacctgtgagcaggatagttaagcctcagcctgtgtatgaaattaatgaaaaaaataggcccaaggactggtctgaggtaactatctggcccaatgcccctgctgtaactccagctgtgttaggatttagatcccaggcaccatctgaggcaagccctccttcatatattgttctggcctccgctgaagaaaatgcctgttctttgcctgtggcaacagcttgccgcccttctaggaacactcgctcatgctcacagcctatccctgagtgtcgttttgattctgacccctgcatccagaccatagatgagattagacgtcaaatcaggatcagggaggtaaatgggattaagccatttgcttgtccttgcaaaatggaatgctatatggattctgaggaatttgaaaaacttgttagcttacttaagtcaactactgatcctcttattcataaaatagcacggattgcaatgggtgtccataatgttcacccatttgcccaagagtttattaacgaagtaggtgtagtgacacttattgaaagcttgctcagttttccttcccctgaaatgagaaaaaagactgtaattactctgaatcctccttctggggatgaaagacaacgcaaaattgaattacatgttaagcatatgtgtaaagaaaccatgtcatttcctttgaactcaccgggacagcaatctggattaaagatactaggacaactgactactgattttgtccatcactacattgttgccaattacttttcagagcttttccatttgctgtcctcaggaaattgcaaaaccagaaatcttgttttgaaactacttttaaatatgtctgaaaatccaactgcagccagagacatgatcaatatgaaggcattggcagcattaaaactcatctttaaccagaaagaggcaaaagccaatcttgttagtggtgtggccatatttattaacataaaggagcatatcagaaaaggctcaattgtagttgttgatcacttgagttataatacactcatggccattttcagggaagttaaagagattattgaaacaatgtaaaatgagccagagatagaacattttaagccatcttcaaactctagcaggctgtacattacagtgtacacattatacactgcatctttaacacagagtcacctgtgacaggctctaggtttgagctagactattttgggggtatcaaatgaatattataccttgggctgaaaatgtttgatttttatcttgtctagattggcatatttttaacattttacttaagatagcaaaccagttcgttttaagtaagctaacttgttcattagtatctgtggcttaaaatggcaaaaaagaaaatatccttgagtttgtaatctagttacagaagtaaggcatacacacacacaaagataacagtacctagagagagagtgtgtgtgagtgtgcgtgtctctgtgtgtgcacgtgcacgctcatggccaaatgtgcgcactctacataaaggaggcaggagttcctataggctatttaatgtaagagaaactatttttctcctgttccagctgtatcagatactcgttccgcaacacagaaatgactcagaatctcagacaaaatgtattatttgttcaattttaattttgctactacattcataactcttaaattgttaggctgtttcatttacatcaaagttatctcacaaaagagaaggcaggaaacgttttgtgagtgcctattctatgtcaaacactgtgttggcaccatattttacaagtttttttcctcttctcacagtgatcttgtgagttagttacttatatttttattagaactcattattctgggtaccctccaatgagaattagagaggttaaataccttttcctagattcccacagcaggaaggtggcatagctgttttgtctgacaccagaacccatctcaccacactgctttacagtcttcctgaaggacattttgaggtgggggggccttcaaagctcagagactggtttgaatggtttaattttgcaatggatcatgtccatgccaggtgttacaattcttaacttcctccaaattcgtgtgtccattagacatttggctacatctggctggaggtcaggagaaaattctgaggtaaatagatggattttatctggcagtgtcgaaaatagtaggagcctaaaactttgttcaatgagtaagatgtagatttggagtcatcagcaggggaaacttgttagatgtcctttgtatctttttctatccatttgtattttttctttcccaaagagctgaaatcattttataccctgaatttaaaaggtaattgcttttttcctccttgcgaaatcataccttaattttttttttttttttttttaccatttatgatttattctcctatgtgtcatatgaaaggccaaggggctttatcttttactagtaggcaagcctgggcatttctgcatttgtgccagctaacactacaaaatagacttaattagagaaatttagacccagaattgcagcttcaacaacacaaaacaggaaagctagaagaggttgctgtgtcaacctacaagatagtgattcttggaagttggtatggaccagaaagcattcccaggacatttaggctatggctgagttctctaagactcagggtgggaattataatccctggtctaagctgatatgaaagtttctatgtgtgaaaatatggagttatatgctttgagattttctgccagttaaactaaaacaagatcatactgtaaatgtttgtaacttgcttccccccactgtatactgtaaacatctttgcatgtcaataaatatgcctctacaacat

SEQ ID NO: 12720 - protein, 34 aa, Homo sapiens
MLRSSRSRESTCPTRSWRGAAVAVGGGLFLSRFL

SEQ ID NO: 12721 - DNA, 4405 bp, Homo sapiens
aggctctgcattaggcctgccgagaggagtgttttcttgcatccagaaaagacctgagaggcggacgacacctgtgctccgcagagcagaacgtgggaggaacggcgggatgttaaggagctcaagaagcagagagtctacctgcccgacgcgttcgtggagaggagcagcggttgctgttggaggaggtctgtttctttctaggttcctgtagagatctgtatgtagctgttcacttggaagttaattaagaaagaacaaaaactattcatttggattcaaggtccatctccactggtggctgtggtggctttggattgttggaagaccatcaccttcagcaggtctgcacttgggaacaatcattctcccccagcccgagcgtgcctctgccctctgtatcattgacagaggctgtatgtttggaaagagaactttgtgactgcagaactgacagttgactctaattcttgctaccaagtttttccccgacccagtgaaagagtgttaagacttcgacctaggacacattgagaaccaaggccaagactggacagggccatataactgggcttcaaccatggctgggactaagaataagacaagagcccaggccaaaactgaaaaaaaggctgctatacaagctaaagctggagcagagagggaggctactggtgttgttaggcctgtagccaagaccagggccaaagcaaaagccaagacagggtctaagacagatgcagtagcagagatgaaggcagtgtctaagaacaaggttgttgctgagacgaaggaaggagctctgtcagagcctaagactctgggcaaagccatgggagatttcactcccaaggctgggaatgagtccaccagctccacatgtaaaaatgaggctggtactgatgcctggttctgggctggggaagaggccactatcaattcctggttctggaatggagaagaggctggtaatagtttcagcactaagaatgataaacctgaaattggtgcccaggtctgtgctgaggagttggaacctgcggctggggccgattgcaaacctaggtcaggggctgaggaggaggaggaagagaatgttattgggaactggttttgggaaggagatgatactagttttgaccctaatcctaaacctgtgagcaggatagttaagcctcagcctgtgtatgaaattaatgaaaaaaataggcccaaggactggtctgaggtaactatctggcccaatgcccctgctgtaactccagctgtgttaggatttagatcccaggcaccatctgaggcaagccctccttcatatattgttctggcctccgctgaagaaaatgcctgttctttgcctgtggcaacagcttgccgcccttctaggaacactcgctcatgctcacagcctatccctgagtgtcgttttgattctgacccctgcatccagaccatagatgagattagacgtcaaatcaggatcagggaggtaaatgggattaagccatttgcttgtccttgcaaaatggaatgctatatggattctgaggaatttgaaaaacttgttagcttacttaagtcaactactgatcctcttattcataaaatagcacggattgcaatgggtgtccataatgttcacccatttgcccaagagtttattaacgaagtaggtgtagtgacacttattgaaagcttgctcagttttccttcccctgaaatgagaaaaaagactgtaattactctgaatcctccttctggggatgaaagacaacgcaaaattgaattacatgttaagcatatgtgtaaagaaaccatgtcatttcctttgaactcaccgggacagcaatctggattaaagatactaggacaactgactactgattttgtccatcactacattgttgccaattacttttcagagcttttccatttgctgtcctcaggaaattgcaaaaccagaaatcttgttttgaaactacttttaaatatgtctgaaaatccaactgcagccagagacatgatcaatatgaaggcattggcagcattaaaactcatctttaaccagaaagaggcaaaagccaatcttgttagtggtgtggccatatttattaacataaaggagcatatcagaaaaggctcaattgtagttgttgatcacttgagttataatacactcatggccattttcagggaagttaaagagattattgaaacaatgtaaaatgagccagagatagaacattttaagccatcttcaaactctagcaggctgtacattacagtgtacacattatacactgcatctttaacacagagtcacctgtgacaggctctaggtttgagctagactattttgggggtatcaaatgaatattataccttgggctgaaaatgtttgatttttatcttgtctagattggcatatttttaacattttacttaagatagcaaaccagttcgttttaagtaagctaacttgttcattagtatctgtggcttaaaatggcaaaaaagaaaatatccttgagtttgtaatctagttacagaagtaaggcatacacacacacaaagataacagtacctagagagagagtgtgtgtgagtgtgcgtgtctctgtgtgtgcacgtgcacgctcatggccaaatgtgcgcactctacataaaggaggcaggagttcctataggctatttaatgtaagagaaactatttttctcctgttccagctgtatcagatactcgttccgcaacacagaaatgactcagaatctcagacaaaatgtattatttgttcaattttaattttgctactacattcataactcttaaattgttaggctgtttcatttacatcaaagttatctcacaaaagagaaggcaggaaacgttttgtgagtgcctattctatgtcaaacactgtgttggcaccatattttacaagtttttttcctcttctcacagtgatcttgtgagttagttacttatatttttattagaactcattattctgggtaccctccaatgagaattagagaggttaaataccttttcctagattcccacagcaggaaggtggcatagctgttttgtctgacaccagaacccatctcaccacactgctttacagtcttcctgaaggacattttgaggtgggggggccttcaaagctcagagactggtttgaatggtttaattttgcaatggatcatgtccatgccaggtgttacaattcttaacttcctccaaattcgtgtgtccattagacatttggctacatctggctggaggtcaggagaaaattctgaggtaaatagatggattttatctggcagtgtcgaaaatagtaggagcctaaaactttgttcaatgagtaagatgtagatttggagtcatcagcaggggaaacttgttagatgtcctttgtatctttttctatccatttgtattttttctttcccaaagagctgaaatcattttataccctgaatttaaaaggtaattgcttttttcctccttgcgaaatcataccttaattttttttttttttttttttaccatttatgatttattctcctatgtgtcatatgaaaggccaaggggctttatcttttactagtaggcaagcctgggcatttctgcatttgtgccagctaacactacaaaatagacttaattagagaaatttagacccagaattgcagcttcaacaacacaaaacaggaaagctagaagaggttgctgtgtcaacctacaagatagtgattcttggaagttggtatggaccagaaagcattcccaggacatttaggctatggctgagttctctaagactcagggtgggaattataatccctggtctaagctgatatgaaagtttctatgtgtgaaaatatggagttatatgctttgagattttctgccagttaaactaaaacaagatcatactgtaaatgtttgtaacttgcttccccccactgtatactgtaaacatctttgcatgtcaataaatatgcctctacaacatatttttgaatcacttaatatttttcccatgttaacagttggtatatagtgttgtaaacctttattgcatattctcataacatacaatatacacattcttttgcaaaaatgggaacacagtattgagacttgccttttcctcttaacacttatcttttcaatttagtattatatagatctgtcacatgctttttatctaataactttatagaaatataattgccatacattaagctgcatgttgaaagtatacagtgtgatcagttttggaatgtatatacacacaaaaccataaccacaatcaaaattgtaaatacattcatcacccaccaaagctactttttttttgagacagagtcttgctctgtcacccaggctgga

SEQ ID NO: 12722 - protein, 34 aa, Homo sapiens; identical to SEQ ID NO: 12720

SEQ ID NO: 12723 - DNA, 564 bp, Homo sapiens
aggctctgcattaggcctgccgagaggagtgttttcttgcatccagaaaagacctgagaggcggacgacacctgtgctccgcagagcagaacgtgggaggaacggcgggatgttaaggagctcaagaagcagagagtctacctgcccgacgcgttcgtggagaggagcagcggttgctgttggaggaggtgggtgcaaggacggcagatggcatccctgagaggtggtgactgagactagatgcgggtgcagattgatactggaaaagcagtttctattgagcccccaaatgaagagtgagtgcagatgaagaggaggcaggactcacaagcccttgaactttattccagatctgttagcacctacaggaccctgcaccaggatttcatctgtactatcagcttcttcaaagagagagaggttgttgactcttcatgtggatgtctgagctcatatcaggtgtctgaaagaggcagattctgaggatttgggtcatgatggctgccaaagcttctactcctgacttaaagggcaacaatcctaggagaccaccagcacttacat

SEQ ID NO: 12724 - protein, 58 aa, Homo sapiens
MKRRQDSQALELYSRSVSTYRTLHQDFICTISFFKEREVVDSSCGCLSSYQVSERGRF

SEQ ID NO: 12725 - DNA, 590 bp, Homo sapiens
attaggcctgccgagaggagtgttttcttgcatccagaaaagacctgagaggcggacgacacctgtgctccgcagagcagaacgtgggaggaacggcgggatgttaaggagctcaagaagcagagagtctacctgcccgacgcgttcgtggagaggagcagcggttgctgttggaggagtattcaggcagtggggatggctgataccagctcaaaactggcggagggtggaggagggcagaagagaacacatacatctgccttttgctccaaggctccagctggctggggatgcaagagaggaatgaacctcaatcccggcagttctaggaaaaggaggaggagacatagactcgaggggaggaaacctagatgctgtgggcccttcacctaggatttctcattaggatactccaagcttctcgacccccaaggggattcctggatctcagccccatgcagcaggatctcattcccattgagggacacaaagtgggttgctactccgtgtgagctctctctccctgctgtcttgggcctcagaggagggtctttctggggaccacctacagaaactgcttcatggatagt

SEQ ID NO: 12726 - protein, 68 aa, Homo sapiens
MLRSSRSRESTCPTRSWRGAAVAVGGVFRQWGWLIPAQNWRRVEEGRREHIHLPFAPRLQLAGDAREE

SEQ ID NO: 12727 - DNA, 4080 bp, Homo sapiens
attaggcctgccgagaggagtgttttcttgcatccagaaaagacctgagaggcggacgacacctgtgctccgcagagcagaacgtgggaggaacggcgggatgttaaggagctcaagaagcagagagtctacctgcccgacgcgttcgtggagaggagcagcggttgctgttggaggaggtgggtgcaaggacggcagatggcatccctgagaggtggtgactgagactagatgcgggtgcaggtctgtttctttctaggttcctgtagagatctgtatgtagctgttcacttggaagttaattaagaaagaacaaaaactattcatttggattcaaggtccatctccactggtggctgtggtggctttggattgttggaagaccatcaccttcagcaggtctgcacttgggaacaatcattctcccccagcccgagcgtgcctctgccctctgtatcattgacagaggctgtatgtttggaaagagaactttgtgactgcagaactgacagttgactctaattcttgctaccaagtttttccccgacccagtgaaagagtgttaagacttcgacctaggacacattgagaaccaaggccaagactggacagggccatataactgggcttcaaccatggctgggactaagaataagacaagagcccaggccaaaactgaaaaaaaggctgctatacaagctaaagctggagcagagagggaggctactggtgttgttaggcctgtagccaagaccagggccaaagcaaaagccaagacagggtctaagacagatgcagtagcagagatgaaggcagtgtctaagaacaaggttgttgctgagacgaaggaaggagctctgtcagagcctaagactctgggcaaagccatgggagatttcactcccaaggctgggaatgagtccaccagctccacatgtaaaaatgaggctggtactgatgcctggttctgggctggggaagaggccactatcaattcctggttctggaatggagaagaggctggtaatagtttcagcactaagaatgataaacctgaaattggtgcccaggtctgtgctgaggagttggaacctgcggctggggccgattgcaaacctaggtcaggggctgaggaggaggaggaagagaatgttattgggaactggttttgggaaggagatgatactagttttgaccctaatcctaaacctgtgagcaggatagttaagcctcagcctgtgtatgaaattaatgaaaaaaataggcccaaggactggtctgaggtaactatctggcccaatgcccctgctgtaactccagctgtgttaggatttagatcccaggcaccatctgaggcaagccctccttcatatattgttctggcctccgctgaagaaaatgcctgttctttgcctgtggcaacagcttgccgcccttctaggaacactcgctcatgctcacagcctatccctgagtgtcgttttgattctgacccctgcatccagaccatagatgagattagacgtcaaatcaggatcagggaggtaaatgggattaagccatttgcttgtccttgcaaaatggaatgctatatggattctgaggaatttgaaaaacttgttagcttacttaagtcaactactgatcctcttattcataaaatagcacggattgcaatgggtgtccataatgttcacccatttgcccaagagtttattaacgaagtaggtgtagtgacacttattgaaagcttgctcagttttccttcccctgaaatgagaaaaaagactgtaattactctgaatcctccttctggggatgaaagacaacgcaaaattgaattacatgttaagcatatgtgtaaagaaaccatgtcatttcctttgaactcaccgggacagcaatctggattaaagatactaggacaactgactactgattttgtccatcactacattgttgccaattacttttcagagcttttccatttgctgtcctcaggaaattgcaaaaccagaaatcttgttttgaaactacttttaaatatgtctgaaaatccaactgcagccagagacatgatcaatatgaaggcattggcagcattaaaactcatctttaaccagaaagaggcaaaagccaatcttgttagtggtgtggccatatttattaacataaaggagcatatcagaaaaggctcaattgtagttgttgatcacttgagttataatacactcatggccattttcagggaagttaaagagattattgaaacaatgtaaaatgagccagagatagaacattttaagccatcttcaaactctagcaggctgtacattacagtgtacacattatacactgcatctttaacacagagtcacctgtgacaggctctaggtttgagctagactattttgggggtatcaaatgaatattataccttgggctgaaaatgtttgatttttatcttgtctagattggcatatttttaacattttacttaagatagcaaaccagttcgttttaagtaagctaacttgttcattagtatctgtggcttaaaatggcaaaaaagaaaatatccttgagtttgtaatctagttacagaagtaaggcatacacacacacaaagataacagtacctagagagagagtgtgtgtgagtgtgcgtgtctctgtgtgtgcacgtgcacgctcatggccaaatgtgcgcactctacataaaggaggcaggagttcctataggctatttaatgtaagagaaactatttttctcctgttccagctgtatcagatactcgttccgcaacacagaaatgactcagaatctcagacaaaatgtattatttgttcaattttaattttgctactacattcataactcttaaattgttaggctgtttcatttacatcaaagttatctcacaaaagagaaggcaggaaacgttttgtgagtgcctattctatgtcaaacactgtgttggcaccatattttacaagtttttttcctcttctcacagtgatcttgtgagttagttacttatatttttattagaactcattattctgggtaccctccaatgagaattagagaggttaaataccttttcctagattcccacagcaggaaggtggcatagctgttttgtctgacaccagaacccatctcaccacactgctttacagtcttcctgaaggacattttgaggtgggggggccttcaaagctcagagactggtttgaatggtttaattttgcaatggatcatgtccatgccaggtgttacaattcttaacttcctccaaattcgtgtgtccattagacatttggctacatctggctggaggtcaggagaaaattctgaggtaaatagatggattttatctggcagtgtcgaaaatagtaggagcctaaaactttgttcaatgagtaagatgtagatttggagtcatcagcaggggaaacttgttagatgtcctttgtatctttttctatccatttgtattttttctttcccaaagagctgaaatcattttataccctgaatttaaaaggtaattgcttttttcctccttgcgaaatcataccttaattttttttttttttttttttaccatttatgatttattctcctatgtgtcatatgaaaggccaaggggctttatcttttactagtaggcaagcctgggcatttctgcatttgtgccagctaacactacaaaatagacttaattagagaaatttagacccagaattgcagcttcaacaacacaaaacaggaaagctagaagaggttgctgtgtcaacctacaagatagtgattcttggaagttggtatggaccagaaagcattcccaggacatttaggctatggctgagttctctaagactcagggtgggaattataatccctggtctaagctgatatgaaagtttctatgtgtgaaaatatggagttatatgctttgagattttctgccagttaaactaaaacaagatcatactgtaaatgtttgtaacttgcttccccccactgtatactgtaaacatctttgcatgtcaataaatatgcctctacaacat

SEQ ID NO: 12728 - protein, 36 aa, Homo sapiens
MLRSSRSRESTCPTRSWRGAAVAVGGGGCKDGRWHP

SEQ ID NO: 12729 - DNA, 4460 bp, Homo sapiens
attaggcctgccgagaggagtgttttcttgcatccagaaaagacctgagaggcggacgacacctgtgctccgcagagcagaacgtgggaggaacggcgggatgttaaggagctcaagaagcagagagtctacctgcccgacgcgttcgtggagaggagcagcggttgctgttggaggaggtgggtgcaaggacggcagatggcatccctgagaggtggtgactgagactagatgcgggtgcaggtctgtttctttctaggttcctgtagagatctgtatgtagctgttcacttggaagttaattaagaaagaacaaaaactattcatttggattcaaggtccatctccactggtggctgtggtggctttggattgttggaagaccatcaccttcagcaggtctgcacttgggaacaatcattctcccccagcccgagcgtgcctctgccctctgtatcattgacagaggctgtatgtttggaaagagaactttgtgactgcagaactgacagttgactctaattcttgctaccaagtttttccccgacccagtgaaagagtgttaagacttcgacctaggacacattgagaaccaaggccaagactggacagggccatataactgggcttcaaccatggctgggactaagaataagacaagagcccaggccaaaactgaaaaaaaggctgctatacaagctaaagctggagcagagagggaggctactggtgttgttaggcctgtagccaagaccagggccaaagcaaaagccaagacagggtctaagacagatgcagtagcagagatgaaggcagtgtctaagaacaaggttgttgctgagacgaaggaaggagctctgtcagagcctaagactctgggcaaagccatgggagatttcactcccaaggctgggaatgagtccaccagctccacatgtaaaaatgaggctggtactgatgcctggttctgggctggggaagaggccactatcaattcctggttctggaatggagaagaggctggtaatagtttcagcactaagaatgataaacctgaaattggtgcccaggtctgtgctgaggagttggaacctgcggctggggccgattgcaaacctaggtcaggggctgaggaggaggaggaagagaatgttattgggaactggttttgggaaggagatgatactagttttgaccctaatcctaaacctgtgagcaggatagttaagcctcagcctgtgtatgaaattaatgaaaaaaataggcccaaggactggtctgaggtaactatctggcccaatgcccctgctgtaactccagctgtgttaggatttagatcccaggcaccatctgaggcaagccctccttcatatattgttctggcctccgctgaagaaaatgcctgttctttgcctgtggcaacagcttgccgcccttctaggaacactcgctcatgctcacagcctatccctgagtgtcgttttgattctgacccctgcatccagaccatagatgagattagacgtcaaatcaggatcagggaggtaaatgggattaagccatttgcttgtccttgcaaaatggaatgctatatggattctgaggaatttgaaaaacttgttagcttacttaagtcaactactgatcctcttattcataaaatagcacggattgcaatgggtgtccataatgttcacccatttgcccaagagtttattaacgaagtaggtgtagtgacacttattgaaagcttgctcagttttccttcccctgaaatgagaaaaaagactgtaattactctgaatcctccttctggggatgaaagacaacgcaaaattgaattacatgttaagcatatgtgtaaagaaaccatgtcatttcctttgaactcaccgggacagcaatctggattaaagatactaggacaactgactactgattttgtccatcactacattgttgccaattacttttcagagcttttccatttgctgtcctcaggaaattgcaaaaccagaaatcttgttttgaaactacttttaaatatgtctgaaaatccaactgcagccagagacatgatcaatatgaaggcattggcagcattaaaactcatctttaaccagaaagaggcaaaagccaatcttgttagtggtgtggccatatttattaacataaaggagcatatcagaaaaggctcaattgtagttgttgatcacttgagttataatacactcatggccattttcagggaagttaaagagattattgaaacaatgtaaaatgagccagagatagaacattttaagccatcttcaaactctagcaggctgtacattacagtgtacacattatacactgcatctttaacacagagtcacctgtgacaggctctaggtttgagctagactattttgggggtatcaaatgaatattataccttgggctgaaaatgtttgatttttatcttgtctagattggcatatttttaacattttacttaagatagcaaaccagttcgttttaagtaagctaacttgttcattagtatctgtggcttaaaatggcaaaaaagaaaatatccttgagtttgtaatctagttacagaagtaaggcatacacacacacaaagataacagtacctagagagagagtgtgtgtgagtgtgcgtgtctctgtgtgtgcacgtgcacgctcatggccaaatgtgcgcactctacataaaggaggcaggagttcctataggctatttaatgtaagagaaactatttttctcctgttccagctgtatcagatactcgttccgcaacacagaaatgactcagaatctcagacaaaatgtattatttgttcaattttaattttgctactacattcataactcttaaattgttaggctgtttcatttacatcaaagttatctcacaaaagagaaggcaggaaacgttttgtgagtgcctattctatgtcaaacactgtgttggcaccatattttacaagtttttttcctcttctcacagtgatcttgtgagttagttacttatatttttattagaactcattattctgggtaccctccaatgagaattagagaggttaaataccttttcctagattcccacagcaggaaggtggcatagctgttttgtctgacaccagaacccatctcaccacactgctttacagtcttcctgaaggacattttgaggtgggggggccttcaaagctcagagactggtttgaatggtttaattttgcaatggatcatgtccatgccaggtgttacaattcttaacttcctccaaattcgtgtgtccattagacatttggctacatctggctggaggtcaggagaaaattctgaggtaaatagatggattttatctggcagtgtcgaaaatagtaggagcctaaaactttgttcaatgagtaagatgtagatttggagtcatcagcaggggaaacttgttagatgtcctttgtatctttttctatccatttgtattttttctttcccaaagagctgaaatcattttataccctgaatttaaaaggtaattgcttttttcctccttgcgaaatcataccttaattttttttttttttttttttaccatttatgatttattctcctatgtgtcatatgaaaggccaaggggctttatcttttactagtaggcaagcctgggcatttctgcatttgtgccagctaacactacaaaatagacttaattagagaaatttagacccagaattgcagcttcaacaacacaaaacaggaaagctagaagaggttgctgtgtcaacctacaagatagtgattcttggaagttggtatggaccagaaagcattcccaggacatttaggctatggctgagttctctaagactcagggtgggaattataatccctggtctaagctgatatgaaagtttctatgtgtgaaaatatggagttatatgctttgagattttctgccagttaaactaaaacaagatcatactgtaaatgtttgtaacttgcttccccccactgtatactgtaaacatctttgcatgtcaataaatatgcctctacaacatatttttgaatcacttaatatttttcccatgttaacagttggtatatagtgttgtaaacctttattgcatattctcataacatacaatatacacattcttttgcaaaaatgggaacacagtattgagacttgccttttcctcttaacacttatcttttcaatttagtattatatagatctgtcacatgctttttatctaataactttatagaaatataattgccatacattaagctgcatgttgaaagtatacagtgtgatcagttttggaatgtatatacacacaaaaccataaccacaatcaaaattgtaaatacattcatcacccaccaaagctactttttttttgagacagagtcttgctctgtcacccaggctgga

SEQ ID NO: 12730 - protein, 36 aa, Homo sapiens; identical to SEQ ID NO: 12728

SEQ ID NO: 12731 - DNA, 3978 bp, Homo sapiens
ctgccgagaggagtgttttcttgcatccagaaaagacctgagaggcggacgacacctgtgctccgcagagcagaacgtgggaggaacggcgggatgttaaggagctcaagaagcagagagtctacctgcccgacgcgttcgtggagaggagcagcggttgctgttggaggaggtgggtgcaaggacggcagatggcatccctgagaggtggtgactgagactagatgcgggtgcaggtccatctccactggtggctgtggtggctttggattgttggaagaccatcaccttcagcaggtctgcacttgggaacaatcattctcccccagcccgagcgtgcctctgccctctgtatcattgacagaggctgtatgtttggaaagagaactttgtgactgcagaactgacagttgactctaattcttgctaccaagtttttccccgacccagtgaaagagtgttaagacttcgacctaggacacattgagaaccaaggccaagactggacagggccatataactgggcttcaaccatggctgggactaagaataagacaagagcccaggccaaaactgaaaaaaaggctgctatacaagctaaagctggagcagagagggaggctactggtgttgttaggcctgtagccaagaccagggccaaagcaaaagccaagacagggtctaagacagatgcagtagcagagatgaaggcagtgtctaagaacaaggttgttgctgagacgaaggaaggagctctgtcagagcctaagactctgggcaaagccatgggagatttcactcccaaggctgggaatgagtccaccagctccacatgtaaaaatgaggctggtactgatgcctggttctgggctggggaagaggccactatcaattcctggttctggaatggagaagaggctggtaatagtttcagcactaagaatgataaacctgaaattggtgcccaggtctgtgctgaggagttggaacctgcggctggggccgattgcaaacctaggtcaggggctgaggaggaggaggaagagaatgttattgggaactggttttgggaaggagatgatactagttttgaccctaatcctaaacctgtgagcaggatagttaagcctcagcctgtgtatgaaattaatgaaaaaaataggcccaaggactggtctgaggtaactatctggcccaatgcccctgctgtaactccagctgtgttaggatttagatcccaggcaccatctgaggcaagccctccttcatatattgttctggcctccgctgaagaaaatgcctgttctttgcctgtggcaacagcttgccgcccttctaggaacactcgctcatgctcacagcctatccctgagtgtcgttttgattctgacccctgcatccagaccatagatgagattagacgtcaaatcaggatcagggaggtaaatgggattaagccatttgcttgtccttgcaaaatggaatgctatatggattctgaggaatttgaaaaacttgttagcttacttaagtcaactactgatcctcttattcataaaatagcacggattgcaatgggtgtccataatgttcacccatttgcccaagagtttattaacgaagtaggtgtagtgacacttattgaaagcttgctcagttttccttcccctgaaatgagaaaaaagactgtaattactctgaatcctccttctggggatgaaagacaacgcaaaattgaattacatgttaagcatatgtgtaaagaaaccatgtcatttcctttgaactcaccgggacagcaatctggattaaagatactaggacaactgactactgattttgtccatcactacattgttgccaattacttttcagagcttttccatttgctgtcctcaggaaattgcaaaaccagaaatcttgttttgaaactacttttaaatatgtctgaaaatccaactgcagccagagacatgatcaatatgaaggcattggcagcattaaaactcatctttaaccagaaagaggcaaaagccaatcttgttagtggtgtggccatatttattaacataaaggagcatatcagaaaaggctcaattgtagttgttgatcacttgagttataatacactcatggccattttcagggaagttaaagagattattgaaacaatgtaaaatgagccagagatagaacattttaagccatcttcaaactctagcaggctgtacattacagtgtacacattatacactgcatctttaacacagagtcacctgtgacaggctctaggtttgagctagactattttgggggtatcaaatgaatattataccttgggctgaaaatgtttgatttttatcttgtctagattggcatatttttaacattttacttaagatagcaaaccagttcgttttaagtaagctaacttgttcattagtatctgtggcttaaaatggcaaaaaagaaaatatccttgagtttgtaatctagttacagaagtaaggcatacacacacacaaagataacagtacctagagagagagtgtgtgtgagtgtgcgtgtctctgtgtgtgcacgtgcacgctcatggccaaatgtgcgcactctacataaaggaggcaggagttcctataggctatttaatgtaagagaaactatttttctcctgttccagctgtatcagatactcgttccgcaacacagaaatgactcagaatctcagacaaaatgtattatttgttcaattttaattttgctactacattcataactcttaaattgttaggctgtttcatttacatcaaagttatctcacaaaagagaaggcaggaaacgttttgtgagtgcctattctatgtcaaacactgtgttggcaccatattttacaagtttttttcctcttctcacagtgatcttgtgagttagttacttatatttttattagaactcattattctgggtaccctccaatgagaattagagaggttaaataccttttcctagattcccacagcaggaaggtggcatagctgttttgtctgacaccagaacccatctcaccacactgctttacagtcttcctgaaggacattttgaggtgggggggccttcaaagctcagagactggtttgaatggtttaattttgcaatggatcatgtccatgccaggtgttacaattcttaacttcctccaaattcgtgtgtccattagacatttggctacatctggctggaggtcaggagaaaattctgaggtaaatagatggattttatctggcagtgtcgaaaatagtaggagcctaaaactttgttcaatgagtaagatgtagatttggagtcatcagcaggggaaacttgttagatgtcctttgtatctttttctatccatttgtattttttctttcccaaagagctgaaatcattttataccctgaatttaaaaggtaattgcttttttcctccttgcgaaatcataccttaattttttttttttttttttttaccatttatgatttattctcctatgtgtcatatgaaaggccaaggggctttatcttttactagtaggcaagcctgggcatttctgcatttgtgccagctaacactacaaaatagacttaattagagaaatttagacccagaattgcagcttcaacaacacaaaacaggaaagctagaagaggttgctgtgtcaacctacaagatagtgattcttggaagttggtatggaccagaaagcattcccaggacatttaggctatggctgagttctctaagactcagggtgggaattataatccctggtctaagctgatatgaaagtttctatgtgtgaaaatatggagttatatgctttgagattttctgccagttaaactaaaacaagatcatactgtaaatgtttgtaacttgcttccccccactgtatactgtaaacatctttgcatgtcaataaatatgcctctacaacat

SEQ ID NO: 12732 - protein, 56 aa, Homo sapiens
MRVQVHLHWWLWWLWIVGRPSPSAGLHLGTIILPQPERASALCIIDRGCMFGKRTL

SEQ ID NO: 12733 - DNA, 1158 bp, Homo sapiens
cttgcatccagaaaagacctgagaggcggacgacacctgtgctccgcagagcagaacgtgggaggaacggcgggatgttaaggagctcaagaagcagagagtctacctgcccgacgcgttcgtggagaggagcagcggttgctgttggaggaggtccatctccactggtggctgtggtggctttggattgttggaagaccatcaccttcagcaggtctgcacttgggaacaatcattctcccccagcccgagcgtgcctctgccctctgtatcattgacagaggctgtatgtttggaaagagaactttgtgactgcagaactgacagttgactctaattcttgctaccaagtttttccccgacccagtgaaagagtgttaagacttcgacctaggacacattgagaaccaaggccaagactggacagggccatataactgggcttcaaccatggctgggactaagaataagacaagagcccaggccaaaactgaaaaaaaggctgctatacaagctaaagctggagcagagagggaggctactggtgttgttaggcctgtagccaagaccagggccaaagcaaaagccaagacagggtctaagacagatgcagtagcagagatgaaggcagtgtctaagaacaaggttgttgctgagacgaaggaaggagctctgtcagagcctaagactctgggcaaagccatgggagatttcactcccaaggctgggaatgagtccaccagctccacatgtaaaaatgaggctggtactgatgcctggttctgggctggggaagaggccactatcaattcctggttctggaatggagaagaggctggtaatagtttcagcactaagaatgataaacctgaaattggtgcccaggtctgtgctgaggagttggaacctgcggctggggccgattgcaaacctaggtcaggggctgaggaggaggaggaagagaatgttattgggaactggttttgggaaggagatgatactagttttgaccctaatcctaaacctgtgagcaggatagttaagcctcagcctgtgtatgaaattaatgaaaaaaataggcccaaggactggtctgaggtaactatctggcccaatgcccctgctgtaactccagctgtgttaggatttagatcccag

SEQ ID NO: 12734 - protein, 67 aa, Homo sapiens
MLRSSRSRESTCPTRSWRGAAVAVGGGPSPLVAVVALDCWKTITFSRSALGNNHSPPARACLCPLYH

SEQ ID NO: 12735 - DNA, 559 bp, Homo sapiens
atccagaaaagacctgagaggcggacgacacctgtgctccgcagagcagaacgtgggaggaacggcgggatgttaaggagctcaagaagcagagagtctacctgcccgacgcgttcgtggagaggagcagcggttgctgttggaggaggaactcagagtggttttccagatgggaatcacattgctctctgtccctgagatcttgctggagacagggctactcagtccctctttgccagattgatactggaaaagcagtttctattgagcccccaaatgaagagtgagtgcagatgaagaggaggcaggactcacaagcccttgaactttattccagatctgttagcacctacaggaccctgcaccaggatttcatctgtactatcagcttcttcaaagagagagaggttgttgactcttcatgtggatgtctgagctcatatcaggtgtctgaaagaggcagattctgaggatttgggtcatgatggctgccaaagcttctactcctgacttaaagggcaacaatcctaggagaccaccagcacttacatccctggta

SEQ ID NO: 12736 - protein, 58 aa, Homo sapiens; identical to SEQ ID NO: 12724

SEQ ID NO: 12737 - DNA, 473 bp, Homo sapiens
gttaaggagctcaagaagcagagagtctacctgcccgacgcgttcgtggagaggagcagcggttgctgttggaggaggtgggtgcaaggacggcagatggcatccctgagaggtggtgactgagactagatgcgggtgcaggtaatgcctcagatccgcctgctccctcctgccttttgaacacccttgacccctcatcccaaggctcccagcccagtgccctgtgtttgtatgtgtgggtgggggaggtgggcatatggatggagttggcttcaggggagcccagagcggggaaatggtgaagtgacaattcgtgaacacctgtggtgctggatcaggaaaggcaggggtggggatgggaaccgtgagctatgcgtccgcactcattctactctctgtcttcttactggcagtattcaggcagtggggatggctgataccagctcaaaactggcggagggtggaggagggca

SEQ ID NO: 12738 - protein, 79 aa, Homo sapiens
MCGWGRWAYGWSWLQGSPERGNGEVTIREHLWCWIRKGRGGDGNRELCVRTHSTLCLLTGSIQAVGMADTSSKLAEGGG

SEQ ID NO: 12739 - DNA, 1058 bp, Homo sapiens
tttttatttttattttttaatgaataacatagaactagtgttgagggacaggaagcatagagaaagaagcttggactctggaagtgtgattcaaaccccagtctgtctgactgcaaagcctgaatgtttactacttaaaatagtaatttgtgttaatattaagatttattggatttattgggtgatttctatgtgccagggtactctactaagggctctaaatgtattcacttagttaatcctcaaaacaaacttatgaggtaggtgctgctattgtttccattctacatatgaggaagctgaggcacacattggttaagtagcttagccaacctcactgagttggttagcagaggaggtgacattcccacctttgtggtttgaatctggagctgatgtgcattacttctatgctatgtctatattcctccagtgctagttatcaataaaagcatccatgatcattgtaactgtttttacaatcagatcttctgttcctcaaagcttgtagcaaagtatttatcataaagaaattaaacctgaatattgttagacctcctgtcccttatccttttttccctgtttatcagcctattccaccctttccttccttcccaacccaatgcacacacacacacacacacacacaaacacacacacacaaaagggttggagagagttttaaaaatggcagaatgttactagatgttgcaacttgctggtgggcatatgggtgttcattaagctatcttttctacctttgtatatgctagaaattaaaattttaatccaaaaataaataaatattggaatcttaatatacaattttaatacttttatcatttgacatgtcctatgtaatatgctgtgaggatgaaaatacaactccattttcttttgaatatgtgttaaaaataataataaaaattatttttctttgcccagtgatttgaaaatgccacttttatcatcataaacatttataaatgctttggtcactctctcagtgggctttctattttatttcattaaattatatattgttatattggttttaa

SEQ ID NO: 12740 - protein, 71 aa, Homo sapiens [sequence omitted]

SEQ ID NO: 12741 - DNA, 1011 bp, Homo sapiens; identical to SEQ ID NO: 2196

SEQ ID NO: 12742 - protein, 336 aa, Homo sapiens; identical to SEQ ID NO: 2197

SEQ ID NO: 12743 - DNA, 4061 bp, Homo sapiens
gcgccgtatccctccgccccccttcccgacaccctcgcggagagagcggttcttgcagcatcctgcgcagcccctgcccagtttggtgcagaggcgtggggggcgggacgcgtctttgccattctgatagcggggaaagcggtgagaatcgaagtgaggagccgccagaggagagctgaggagaggagggggaggtcgacgacctgggccctgggcctctgaaggtctgtttctttctaggttcctgtagagatctgtatgtagctgttcacttggaagttaattaagaaagaacaaaaactattcatttggattcaaggtccatctccactggtggctgtggtggctttggattgttggaagaccatcaccttcagcaggtctgcacttgggaacaatcattctcccccagcccgagcgtgcctctgccctctgtatcattgacagaggctgtatgtttggaaagagaactttgtgactgcagaactgacagttgactctaattcttgctaccaagtttttccccgacccagtgaaagagtgttaagacttcgacctaggacacattgagaaccaaggccaagactggacagggccatataactgggcttcaaccatggctgggactaagaataagacaagagcccaggccaaaactgaaaaaaaggctgctatacaagctaaagctggagcagagagggaggctactggtgttgttaggcctgtagccaagaccagggccaaagcaaaagccaagacagggtctaagacagatgcagtagcagagatgaaggcagtgtctaagaacaaggttgttgctgagacgaaggaaggagctctgtcagagcctaagactctgggcaaagccatgggagatttcactcccaaggctgggaatgagtccaccagctccacatgtaaaaatgaggctggtactgatgcctggttctgggctggggaagaggccactatcaattcctggttctggaatggagaagaggctggtaatagtttcagcactaagaatgataaacctgaaattggtgcccaggtctgtgctgaggagttggaacctgcggctggggccgattgcaaacctaggtcaggggctgaggaggaggaggaagagaatgttattgggaactggttttgggaaggagatgatactagttttgaccctaatcctaaacctgtgagcaggatagttaagcctcagcctgtgtatgaaattaatgaaaaaaataggcccaaggactggtctgaggtaactatctggcccaatgcccctgctgtaactccagctgtgttaggatttagatcccaggcaccatctgaggcaagccctccttcatatattgttctggcctccgctgaagaaaatgcctgttctttgcctgtggcaacagcttgccgcccttctaggaacactcgctcatgctcacagcctatccctgagtgtcgttttgattctgacccctgcatccagaccatagatgagattagacgtcaaatcaggatcagggaggtaaatgggattaagccatttgcttgtccttgcaaaatggaatgctatatggattctgaggaatttgaaaaacttgttagcttacttaagtcaactactgatcctcttattcataaaatagcacggattgcaatgggtgtccataatgttcacccatttgcccaagagtttattaacgaagtaggtgtagtgacacttattgaaagcttgctcagttttccttcccctgaaatgagaaaaaagactgtaattactctgaatcctccttctggggatgaaagacaacgcaaaattgaattacatgttaagcatatgtgtaaagaaaccatgtcatttcctttgaactcaccgggacagcaatctggattaaagatactaggacaactgactactgattttgtccatcactacattgttgccaattacttttcagagcttttccatttgctgtcctcaggaaattgcaaaaccagaaatcttgttttgaaactacttttaaatatgtctgaaaatccaactgcagccagagacatgatcaatatgaaggcattggcagcattaaaactcatctttaaccagaaagaggcaaaagccaatcttgttagtggtgtggccatatttattaacataaaggagcatatcagaaaaggctcaattgtagttgttgatcacttgagttataatacactcatggccattttcagggaagttaaagagattattgaaacaatgtaaaatgagccagagatagaacattttaagccatcttcaaactctagcaggctgtacattacagtgtacacattatacactgcatctttaacacagagtcacctgtgacaggctctaggtttgagctagactattttgggggtatcaaatgaatattataccttgggctgaaaatgtttgatttttatcttgtctagattggcatatttttaacattttacttaagatagcaaaccagttcgttttaagtaagctaacttgttcattagtatctgtggcttaaaatggcaaaaaagaaaatatccttgagtttgtaatctagttacagaagtaaggcatacacacacacaaagataacagtacctagagagagagtgtgtgtgagtgtgcgtgtctctgtgtgtgcacgtgcacgctcatggccaaatgtgcgcactctacataaaggaggcaggagttcctataggctatttaatgtaagagaaactatttttctcctgttccagctgtatcagatactcgttccgcaacacagaaatgactcagaatctcagacaaaatgtattatttgttcaattttaattttgctactacattcataactcttaaattgttaggctgtttcatttacatcaaagttatctcacaaaagagaaggcaggaaacgttttgtgagtgcctattctatgtcaaacactgtgttggcaccatattttacaagtttttttcctcttctcacagtgatcttgtgagttagttacttatatttttattagaactcattattctgggtaccctccaatgagaattagagaggttaaataccttttcctagattcccacagcaggaaggtggcatagctgttttgtctgacaccagaacccatctcaccacactgctttacagtcttcctgaaggacattttgaggtgggggggccttcaaagctcagagactggtttgaatggtttaattttgcaatggatcatgtccatgccaggtgttacaattcttaacttcctccaaattcgtgtgtccattagacatttggctacatctggctggaggtcaggagaaaattctgaggtaaatagatggattttatctggcagtgtcgaaaatagtaggagcctaaaactttgttcaatgagtaagatgtagatttggagtcatcagcaggggaaacttgttagatgtcctttgtatctttttctatccatttgtattttttctttcccaaagagctgaaatcattttataccctgaatttaaaaggtaattgcttttttcctccttgcgaaatcataccttaattttttttttttttttttttaccatttatgatttattctcctatgtgtcatatgaaaggccaaggggctttatcttttactagtaggcaagcctgggcatttctgcatttgtgccagctaacactacaaaatagacttaattagagaaatttagacccagaattgcagcttcaacaacacaaaacaggaaagctagaagaggttgctgtgtcaacctacaagatagtgattcttggaagttggtatggaccagaaagcattcccaggacatttaggctatggctgagttctctaagactcagggtgggaattataatccctggtctaagctgatatgaaagtttctatgtgtgaaaatatggagttatatgctttgagattttctgccagttaaactaaaacaagatcatactgtaaatgtttgtaacttgcttccccccactgtatactgtaaacatctttgcatgtcaataaatatgcctctacaacat

SEQ ID NO: 12744 - protein, 547 aa, Homo sapiens; identical to SEQ ID NO: 2195

SEQ ID NO: 12745 - DNA, 4441 bp, Homo sapiens
gcgccgtatccctccgccccccttcccgacaccctcgcggagagagcggttcttgcagcatcctgcgcagcccctgcccagtttggtgcagaggcgtggggggcgggacgcgtctttgccattctgatagcggggaaagcggtgagaatcgaagtgaggagccgccagaggagagctgaggagaggagggggaggtcgacgacctgggccctgggcctctgaaggtctgtttctttctaggttcctgtagagatctgtatgtagctgttcacttggaagttaattaagaaagaacaaaaactattcatttggattcaaggtccatctccactggtggctgtggtggctttggattgttggaagaccatcaccttcagcaggtctgcacttgggaacaatcattctcccccagcccgagcgtgcctctgccctctgtatcattgacagaggctgtatgtttggaaagagaactttgtgactgcagaactgacagttgactctaattcttgctaccaagtttttccccgacccagtgaaagagtgttaagacttcgacctaggacacattgagaaccaaggccaagactggacagggccatataactgggcttcaaccatggctgggactaagaataagacaagagcccaggccaaaactgaaaaaaaggctgctatacaagctaaagctggagcagagagggaggctactggtgttgttaggcctgtagccaagaccagggccaaagcaaaagccaagacagggtctaagacagatgcagtagcagagatgaaggcagtgtctaagaacaaggttgttgctgagacgaaggaaggagctctgtcagagcctaagactctgggcaaagccatgggagatttcactcccaaggctgggaatgagtccaccagctccacatgtaaaaatgaggctggtactgatgcctggttctgggctggggaagaggccactatcaattcctggttctggaatggagaagaggctggtaatagtttcagcactaagaatgataaacctgaaattggtgcccaggtctgtgctgaggagttggaacctgcggctggggccgattgcaaacctaggtcaggggctgaggaggaggaggaagagaatgttattgggaactggttttgggaaggagatgatactagttttgaccctaatcctaaacctgtgagcaggatagttaagcctcagcctgtgtatgaaattaatgaaaaaaataggcccaaggactggtctgaggtaactatctggcccaatgcccctgctgtaactccagctgtgttaggatttagatcccaggcaccatctgaggcaagccctccttcatatattgttctggcctccgctgaagaaaatgcctgttctttgcctgtggcaacagcttgccgcccttctaggaacactcgctcatgctcacagcctatccctgagtgtcgttttgattctgacccctgcatccagaccatagatgagattagacgtcaaatcaggatcagggaggtaaatgggattaagccatttgcttgtccttgcaaaatggaatgctatatggattctgaggaatttgaaaaacttgttagcttacttaagtcaactactgatcctcttattcataaaatagcacggattgcaatgggtgtccataatgttcacccatttgcccaagagtttattaacgaagtaggtgtagtgacacttattgaaagcttgctcagttttccttcccctgaaatgagaaaaaagactgtaattactctgaatcctccttctggggatgaaagacaacgcaaaattgaattacatgttaagcatatgtgtaaagaaaccatgtcatttcctttgaactcaccgggacagcaatctggattaaagatactaggacaactgactactgattttgtccatcactacattgttgccaattacttttcagagcttttccatttgctgtcctcaggaaattgcaaaaccagaaatcttgttttgaaactacttttaaatatgtctgaaaatccaactgcagccagagacatgatcaatatgaaggcattggcagcattaaaactcatctttaaccagaaagaggcaaaagccaatcttgttagtggtgtggccatatttattaacataaaggagcatatcagaaaaggctcaattgtagttgttgatcacttgagttataatacactcatggccattttcagggaagttaaagagattattgaaacaatgtaaaatgagccagagatagaacattttaagccatcttcaaactctagcaggctgtacattacagtgtacacattatacactgcatctttaacacagagtcacctgtgacaggctctaggtttgagctagactattttgggggtatcaaatgaatattataccttgggctgaaaatgtttgatttttatcttgtctagattggcatatttttaacattttacttaagatagcaaaccagttcgttttaagtaagctaacttgttcattagtatctgtggcttaaaatggcaaaaaagaaaatatccttgagtttgtaatctagttacagaagtaaggcatacacacacacaaagataacagtacctagagagagagtgtgtgtgagtgtgcgtgtctctgtgtgtgcacgtgcacgctcatggccaaatgtgcgcactctacataaaggaggcaggagttcctataggctatttaatgtaagagaaactatttttctcctgttccagctgtatcagatactcgttccgcaacacagaaatgactcagaatctcagacaaaatgtattatttgttcaattttaattttgctactacattcataactcttaaattgttaggctgtttcatttacatcaaagttatctcacaaaagagaaggcaggaaacgttttgtgagtgcctattctatgtcaaacactgtgttggcaccatattttacaagtttttttcctcttctcacagtgatcttgtgagttagttacttatatttttattagaactcattattctgggtaccctccaatgagaattagagaggttaaataccttttcctagattcccacagcaggaaggtggcatagctgttttgtctgacaccagaacccatctcaccacactgctttacagtcttcctgaaggacattttgaggtgggggggccttcaaagctcagagactggtttgaatggtttaattttgcaatggatcatgtccatgccaggtgttacaattcttaacttcctccaaattcgtgtgtccattagacatttggctacatctggctggaggtcaggagaaaattctgaggtaaatagatggattttatctggcagtgtcgaaaatagtaggagcctaaaactttgttcaatgagtaagatgtagatttggagtcatcagcaggggaaacttgttagatgtcctttgtatctttttctatccatttgtattttttctttcccaaagagctgaaatcattttataccctgaatttaaaaggtaattgcttttttcctccttgcgaaatcataccttaattttttttttttttttttttaccatttatgatttattctcctatgtgtcatatgaaaggccaaggggctttatcttttactagtaggcaagcctgggcatttctgcatttgtgccagctaacactacaaaatagacttaattagagaaatttagacccagaattgcagcttcaacaacacaaaacaggaaagctagaagaggttgctgtgtcaacctacaagatagtgattcttggaagttggtatggaccagaaagcattcccaggacatttaggctatggctgagttctctaagactcagggtgggaattataatccctggtctaagctgatatgaaagtttctatgtgtgaaaatatggagttatatgctttgagattttctgccagttaaactaaaacaagatcatactgtaaatgtttgtaacttgcttccccccactgtatactgtaaacatctttgcatgtcaataaatatgcctctacaacatatttttgaatcacttaatatttttcccatgttaacagttggtatatagtgttgtaaacctttattgcatattctcataacatacaatatacacattcttttgcaaaaatgggaacacagtattgagacttgccttttcctcttaacacttatcttttcaatttagtattatatagatctgtcacatgctttttatctaataactttatagaaatataattgccatacattaagctgcatgttgaaagtatacagtgtgatcagttttggaatgtatatacacacaaaaccataaccacaatcaaaattgtaaatacattcatcacccaccaaagctactttttttttgagacagagtcttgctctgtcacccaggctgga

SEQ ID NO: 12746 - protein, 547 aa, Homo sapiens; identical to SEQ ID NO: 2195

SEQ ID NO: 12747 - DNA, 1200 bp, Homo sapiens
acaccctcgcggagagagcggttcttgcagcatcctgcgcagcccctgcccagtttggtgcagaggcgtggggggcgggacgcgtctttgccattctgatagcggggaaagcggtgagaatcgaagtgaggagccgccagaggagagctgaggagaggagggggaggtcgacgacctgggccctgggcctctcaggtccatctccactggtggctgtggtggctttggattgttggaagaccatcaccttcagcaggtctgcacttgggaacaatcattctcccccagcccgagcgtgcctctgccctctgtatcattgacagaggctgtatgtttggaaagagaactttgtgactgcagaactgacagttgactctaattcttgctaccaagtttttccccgacccagtgaaagagtgttaagacttcgacctaggacacattgagaaccaaggccaagactggacagggccatataactgggcttcaaccatggctgggactaagaataagacaagagcccaggccaaaactgaaaaaaaggctgctatacaagctaaagctggagcagagagggaggctactggtgttgttaggcctgtagccaagaccagggccaaagcaaaagccaagacagggtctaagacagatgcagtagcagagatgaaggcagtgtctaagaacaaggttgttgctgagacgaaggaaggagctctgtcagagcctaagactctgggcaaagccatgggagatttcactcccaaggctgggaatgagtccaccagctccacatgtaaaaatgaggctggtactgatgcctggttctgggctggggaagaggccactatcaattcctggttctggaatggagaagaggctggtaatagtttcagcactaagaatgataaacctgaaattggtgcccaggtctgtgctgaggagttggaacctgcggctggggccgattgcaaacctaggtcaggggctgaggaggaggaggaagagaatgttattgggaactggttttgggaaggagatgatactagttttgaccctaatcctaaacctgtgagcaggatagttaagcctcagcctgtgtatgaaattaatgaaaaaaataggcccaaggactggtctgaggtaactatctggcccaatgcccctgctgtaactccagctgtgttaggatttagatcccag

SEQ ID NO: 12748 - protein, 235 aa, Homo sapiens
MAGTKNKTRAQAKTEKKAAIQAKAGAEREATGVVRPVAKTRAKAKAKTGSKTDAVAEMKAVSKNKVVAETKEGALSEPKTLGKAMGDFTPKAGNESTSSTCKNEAGTDAWFWAGEEATINSWFWNGEEAGNSFSTKNDKPEIGAQVCAEELEPAAGADCKPRSGAEEEEEENVIGNWFWEGDDTSFDPNPKPVSRIVKPQPVYEINEKNRPKDWSEVTIWPNAPAVTPAVLGFRS

SEQ ID NO: 12749 - DNA, 981 bp, Homo sapiens
atcgaagtgaggagccgccagaggagagctgaggagaggagggggaggtcgacgacctgggccctgggcctctgaaggtctgtttctttctaggttcctgtagagatctgtatgtttggaaagagaactttgtgactgcagaactgacagttgactctaattcttgctaccaagtttttccccgacccagtgaaagagtgttaagacttcgacctaggacacattgagaaccaaggccaagactggacagggccatataactgggcttcaaccatggctgggactaagaataagacaagagcccaggccaaaactgaaaaaaaggctgctatacaagctaaagctggagcagagagggaggctactggtgttgttaggcctgtagccaagaccagggccaaagcaaaagccaagacagggtctaagacagatgcagtagcagagatgaaggcagtgtctaagaacaaggttgttgctgagacgaaggaaggagctctgtcagagcctaagactctgggcaaagccatgggagatttcactcccaaggctgggaatgagtccaccagctccacatgtaaaaatgaggctggtactgatgcctggttctgggctggggaagaggccactatcaattcctggttctggaatggagaagaggctggtaatagtttcagcactaagaatgataaacctgaaattggtgcccaggtctgtgctgaggagttggaacctgcggctggggccgattgcaaacctaggtcaggggctgaggaggaggaggaagagaatgttattgggaactggttttgggaaggagatgatactagttttgaccctaatcctaaacctgtgagcaggatagttaagcctcagcctgtgtatgaaattaatgaaaaaaataggcccaaggactggtctgaggtaactatctggcccaatgcccctgctgtaactccagctgtgttaggatttagatcccag

SEQ ID NO: 12750 - protein, 235 aa, Homo sapiens; identical to SEQ ID NO: 12748

SEQ ID NO: 12751 - DNA, 716 bp, Homo sapiens
gagaccaatttggcctggggagaaccgccttcaggcgtttggactcagtggaggttgtgagtgcccagcagtgtggcctgaatctccgtggggtttagggagacgaaaggaccccagatcgacgtcccctcgttcccactttggggatcggcgctctggctgtttcgtgaaggagagagaggttgattccataccctggctattgtgaataatgctgcagtgaacatgggagtacatacatctgtttgaggaactcagagtggttttccagatgggaatcacattgctctctgtccctgagatcttgctggagacagggctactcagtccctctttgccaggtaatctgttccagaagaaacatgtgtcgttctgactgagcccctgcctgtctgtcaccttaagagccagtcaattcatatggtccccatatcaaagtctcctgtgcccagagagaggatttcatttcaaccatcaccatcaccaccatcatcatcatcaccaagagatgttgttgaattgatactggaaaagcagtttctattgagcccccaaatgaagagtgagtgcagatgaagaggaggcaggactcacaagcccttgaactttattccagatctgttagcacctacaggaccctgcaccaggatttcatctgtactatcagcttcttcaaagagagagaggttgttgaattgatattggaaaagcagttt

SEQ ID NO: 12752 - protein, 51 aa, Homo sapiens
MVPISKSPVPRERISFQPSPSPPSSSSPRDVVELILEKQFLLSPQMKSECR

SEQ ID NO: 12753 - DNA, 1805 bp, Homo sapiens
gagaccaatttggcctggggagaaccgccttcaggcgtttggactcagtggaggttgtgagtgcccagcagtgtggcctgaatctccgtggggtttagggagacgaaaggaccccagatcgacgtcccctcgttcccactttggggatcggcgctctggctgtttcgtgaaggagagagaggttgattccataccctggctattgtgaataatgctgcagtgaacatgggagtacatacatctgtttgagattgatactggaaaagcagtttctattgagcccccaaatgaagagtgagtgcagatgaagaggaggcaggactcacaagcccttgaactttattccagatctgttagcacctacaggaccctgcaccaggatttcatctgtactatcagcttcttcaaagagagagaggttgttgagctcagaagtgacaaaagagaattatcaggatggcagtccttataaccagatgcttatcaacattcttcactacattctgaagatgaatttctacaagggaaattgtttatatttgttgttggggatagataaggaaagaagaaaaaggctctggtgagaaacccattgtaccttctggatatgatcactacccaattttatcagtgtcattgatcactaacccagtgcctcgtatggtgccaggcacagagttactccaagaatgtacaataatggctggattctctttctccctgtgcaactcttcatgcatgtgactgaacttatattaagtgtctgaaggaggttcgttctgaggatctgggacatgatgggtgctgaagcttctactcaagatttgaagggcagctgtcctcaggagacccctggcacttccctccatggtgggatgtgatgcctgattccagtgagttcatagagctgaacaaaagtacgttgtggaatagctcctgtgaggttcacaacatagtccggaagatgagaaactactttttttagtaacctggattcccatctaagagatgccttactttatcgtaaagcaatgagttgttcacttgaggagggaacttcatgtttaacatgtatttgcaacaaatttacatacattttctgcctgtatgaatagttgtcagtgatgcccatgaatttctcagatggatgttgaagtatacagttagaaggttagaagatcttcctagcaatctgtgattacggtatgcattcttccatggtttctacgtttttgtctattctataatgaaattttctaagaagccagaaattaattaagtgctacctaaaaatatcaaaatgtcaggtacaagaatttggcattttcaaaattagtaattacaatgtaagtttgccctattataatgatacccagctatgtccagtaacataactagattgttctgaataccgttattatttcccaataatacaaacatcacaatttcagttctgtagtacctggcctacctacccttcccactgccttgccccaggtaaacacagcatgcctgtcactatacattattttacatgcctggaaatatatttaaatggaatcatagaggtggtttcttttttttttttttatcaacacctggcttttttcattcactccacttatttttatatttatccattttattgcatttatctattgatatacttcattctttttgattgctaaatactattgcggtatacaaccacactaaacattttattatccatccatttgtcgatggacattttggttgtttctcatttggggctcttgtaaataaagctgctatgaacatttgtg

SEQ ID NO: 12754 - protein, 55 aa, Homo sapiens
MKRRQDSQALELYSRSVSTYRTLHQDFICTISFFKEREVVELRSDKRELSGWQSL

SEQ ID NO: 12755 - DNA, 2105 bp, Homo sapiens
ggagaaccgccttcaggcgtttggactcagtggaggttgtgagtgcccagcagtgtggcctgaatctccgtggggtttagggagacgaaaggaccccagatcgacgtcccctcgttcccactttggggatcggcgctctggctgtttcgtgaaggagagagaggttgattccataccctggctattgtgaataatgctgcagtgaacatgggagtacatacatctgtttgaggaactcagagtggttttccagatgggaatcacattgctctctgtccctgagatcttgctggagacagggctactcagtccctctttgccagattgatactggaaaagcagtttctattgagcccccaaatgaagagtgagtgcagatgaagaggaggcaggactcacaagcccttgaactttattccagatctgttagcacctacaggaccctgcaccaggatttcatctgtactatcagcttcttcaaagagagagaggttgttgaattgatattggaaaagcagtttcccattgagtctcaaatgaagagagtgcagatgaagaggagctcttcatgtggatgtctgagctcatatcaggtgtctgaaagaggcagattctgaggatttgggtcatgatggctgccaaagcttctactcctgacttaaagggcaacaatcctaggagaccaccagcacttacatccctggtaggacatgacacctgcttatggctcagaagtgacaaaagagaattatcaggatggcagtccttataaccagatgcttatcaacattcttcactacattctgaagatgaatttctacaagggaaattgtttatatttgttgttggggatagataaggaaagaagaaaaaggctctggtgagaaacccattgtaccttctggatatgatcactacccaattttatcagtgtcattgatcactaacccagtgcctcgtatggtgccaggcacagagttactccaagaatgtacaataatggctggattctctttctccctgtgcaactcttcatgcatgtgactgaacttatattaagtgtctgaaggaggttcgttctgaggatctgggacatgatgggtgctgaagcttctactcaagatttgaagggcagctgtcctcaggagacccctggcacttccctccatggtgggatgtgatgcctgattccagtgagttcatagagctgaacaaaagtacgttgtggaatagctcctgtgaggttcacaacatagtccggaagatgagaaactactttttttagtaacctggattcccatctaagagatgccttactttatcgtaaagcaatgagttgttcacttgaggagggaacttcatgtttaacatgtatttgcaacaaatttacatacattttctgcctgtatgaatagttgtcagtgatgcccatgaatttctcagatggatgttgaagtatacagttagaaggttagaagatcttcctagcaatctgtgattacggtatgcattcttccatggtttctacgtttttgtctattctataatgaaattttctaagaagccagaaattaattaagtgctacctaaaaatatcaaaatgtcaggtacaagaatttggcattttcaaaattagtaattacaatgtaagtttgccctattataatgatacccagctatgtccagtaacataactagattgttctgaataccgttattatttcccaataatacaaacatcacaatttcagttctgtagtacctggcctacctacccttcccactgccttgccccaggtaaacacagcatgcctgtcactatacattattttacatgcctggaaatatatttaaatggaatcatagaggtggtttcttttttttttttttatcaacacctggcttttttcattcactccacttatttttatatttatccattttattgcatttatctattgatatacttcattctttttgattgctaaatactattgcggtatacaaccacactaaacattttattatccatccatttgtcgatggacattttggttgtttctcatttggggctcttgtaaataaagctgctatgaacatttgtg

SEQ ID NO: 12756 - protein, 79 aa, Homo sapiens
MKRRQDSQALELYSRSVSTYRTLHQDFICTISFFKEREVVELILEKQFPIESQMKRVQMKRSSSCGCLSSYQVSERGRF

SEQ ID NO: 12757 - DNA, 547 bp, Homo sapiens
aaccgccttcaggcgtttggactcagtggaggttgtgagtgcccagcagtgtggcctgaatctccgtggggtttagggagacgaaaggaccccagatcgacgtcccctcgttcccactttggggatcggcgctctggctgtttcgtgaaggagagagaggtgggtctcttctggccccagtgagtgtggtgtcctgctccagggtgtcccggggctactttccctgtaaaggcgggacgcgggaggatgagacaggttgattccataccctggctattgtgaataatgctgcagtgaacatgggagtacatacatctgtttgaggaactcagagtggttttccagatgggaatcacattgctctctgtccctgagatcttgctggagacagggctactcagtccctctttgccaggtaatctgttccagaagaaacatgtgtcgttctgactgagcccctgcctgtctgtcaccttaagagccagtcaattcatatggtccccatatcaaagtctcctgtgcccagagagaggatttcatttcaacc

SEQ ID NO: 12758 - protein, 34 aa, Homo sapiens
MGITLLSVPEILLETGLLSPSLPGNLFQKKHVSF

SEQ ID NO: 12759 - DNA, 711 bp, Homo sapiens
aaccgccttcaggcgtttggactcagtggaggttgtgagtgcccagcagtgtggcctgaatctccgtggggtttagggagacgaaaggaccccagatcgacgtcccctcgttcccactttggggatcggcgctctggctgtttcgtgaaggagagagaggaactcagagtggttttccagatgggaatcacattgctctctgtccctgagatcttgctggagacagggctactcagtccctctttgccaggtaatctgttccagaagaaacatgtgtcgttctgactgagcccctgcctgtctgtcaccttaagagccagtcaattcatatggtccccatatcaaagtctcctgtgcccagagagaggatttcatttcaaccatcaccatcaccaccatcatcatcatcaccaagagatgttgttgaattgatactggaaaagcagtttctattgagcccccaaatgaagagtgagtgcagatgaagaggaggcaggactcacaagcccttgaactttattccagatctgttagcacctacaggaccctgcaccaggatttcatctgtactatcagcttcttcaaagagagagaggttgttgaattgatattggaaaagcagtttcccattgagtctcaaatgaagagagtgcagatgaagaggaggtaggagtcacaagcccttgaccctcatgctagacccattaccac

SEQ ID NO: 12760 - protein, 62 aa, Homo sapiens [sequence omitted]

SEQ ID NO: 12761 - DNA, 652 bp, Homo sapiens
aaccgccttcaggcgtttggactcagtggaggttgtgagtgcccagcagtgtggcctgaatctccgtggggtttagggagacgaaaggaccccagatcgacgtcccctcgttcccactttggggatcggcgctctggctgtttcgtgaaggagagagaggaactcagagtggttttccagatgggaatcacattgctctctgtccctgagatcttgctggagacagggctactcagtccctctttgccaggtaatctgttccagaagaaacatgtgtcgttctgactgagcccctgcctgtctgtcaccttaagagccagtcaattcatatggtccccatatcaaagtctcctgtgcccagagagaggatttcatttcaaccatcaccatcaccaccatcatcatcatcaccaagagatgttgttgaattgatactggaaaagcagtttctattgagcccccaaatgaagagtgagtgcagatgaagaggaggcaggactcacaagcccttgaactttattccagatctgttagcacctacaggaccctgcaccaggatttcatctgtactatcagcttcttcaaagagagagaggttgttgaattgatattggaaaagcagtttcccattgagtctcaaatgaagaaagag

SEQ ID NO: 12762 - protein, 56 aa, Homo sapiens
MKRRQDSQALELYSRSVSTYRTLHQDFICTISFFKEREVVELILEKQFPIESQMKK

SEQ ID NO: 12763 - DNA, 777 bp, Homo sapiens
cgtttggactcagtggaggttgtgagtgcccagcagtgtggcctgaatctccgtggggtttagggagacgaaaggaccccagatcgacgtcccctcgttcccactttggggatcggcgctctggctgtttcgtgaaggagagagaggttgattccataccctggctattgtgaataatgctgcagtgaacatgggagtacatacatctgtttgaggaactcagagtggttttccagatgggaatcacattgctctctgtccctgagatcttgctggagacagggctactcagtccctctttgccagattgatactggaaaagcagtttctattgagcccccaaatgaagagtgagtgcagatgaagaggaggcaggactcacaagcccttgaactttattccagatctgttagcacctacaggaccctgcaccaggatttcatctgtactatcagcttcttcaaagagagagaggttgttgaattgatattggaaaagcagtttcccattgagtctcaaatgaagagagtgcagatgaagaggagaagactctgtattgaaccaaggtgctctacacagtagcccctactaagctcccagcagatgccagcatcagtcatccatctcttcatgtggatgtctgagctcatatcaggtgtctgaaagaggcagattctgaggatttgggtcatgatggctgccaaagcttctactcctgacttaaagggcaacaatcctaggagaccaccagcacttacatccctggtaggacatgac

SEQ ID NO: 12764 - protein, 73 aa, Homo sapiens
MKRRQDSQALELYSRSVSTYRTLHQDFICTISFFKEREVVELILEKQFPIESQMKRVQMKRRRLCIEPRCSTQ

SEQ ID NO: 12765 - DNA, 482 bp, Homo sapiens
ggaaaagcagtttcccattgagtctcaaatgaagagagtgcagatgaagaggaggtaggagtcacaagcccttgaccctcatgctagacccattaccacccacaggaccttgcagtgggatttcatctgcaccatcagcttcttcagagagagaggttgttgaactctgtattgaaccaaggtgctctacacagtagcccctactaagctcccagcagatgccagcatcagtcatccatctcttcatgtggatgtctgagctcatatcaggtgtctgaaagaggcagattctgaggatttgggtcatgatggctgccaaagcttctactcctgacttaaagggcaacaatcctaggagaccaccagcacttacatccctggtaggacatgacacctgcttatggctcagaagtgacaaaagagaattatcaggatggcagtccttataaccagatgcttatcaacattcttcactacattct

SEQ ID NO: 12766 - protein, 47 aa, Homo sapiens
MMAAKASTPDLKGNNPRRPPALTSLVGHDTCLWLRSDKRELSGWQSL

SEQ ID NO: 12767 - DNA, 2011 bp, Homo sapiens
cccacaggaccttgcagtgggatttcatctgcaccatcagcttcttcagagagagaggttgttgactcttcatgtggatgtctgagctcatatcaggtgtctgaaagaggcagattctgaggatttgggtcatgatggctgccaaagcttctactcctgacttaaagggcaacaatcctaggagaccaccagcacttacatccctggtaggacatgacacctgcttatggctcagaagtgacaaaagagaattatcaggatggcagtccttataaccagatgcttatcaacattcttcactacattctgaagatgaatttctacaagggaaattgtttatgtaagtggtgtgtaccctttgatatgtattgacatagtggcacacatagagttgtgccatttaaactccccaaggggaggcatgtgaggtcggccacagaggactgaagaaattagttaatgctgacatcctatcacatagggtgggtcctggactccgtcatggacctgctgtcatgccattgccacaattggaagacgtggaagtgatcagatgcaatcaaattttgtacacaagcacatcctgatgtagcgatgagggaaagggggaagaggaatgatcattgcttggacttacaggacagaggcagaagggctaggacacaggcactctttatacgcattctttttttttttttttttttgagacggagtatcgcctgttgccaggctggaatgcaatggtgtgatctcagctcactgcaacctccgcctcctgggttcaagcgattctcctgcctcagcctcctgagtagctaggactgtaggcacgcaccaccacgcccagctaattttttgtatttttagtatagtcgaggtttcaccatgttggccaggatggtctccatctcttgagctcgtaatccgcctgcctcggccttctacagtgctgggattacaggcgtcagccaccacacccggccctatatgcattcatttttatgtaaaacatatgcatcaattcttttgtatgaaaacgtttggtcattactgtggtacaacagaagaccaggtcagtaccatatttttttttcatatgtacacggatttttattttgttttagacattgtcttacacacaatagacattcagtatttgttgaaattaatgaaagaaaagagaaacatgaaaacggtctgagaagacaataatctgctttttaatttatagacagcaattaggtcaaacaattatagcaatgatgacaaagaacaatatctgaggtacactcaaaaccttatgagggttatttgccagttttcctggctatttctacaccctttgatctctagtgaatgtttctacttacaactacatattttgtaagttttgcctactgtatttcaatcaacactgtaaaaaatgaagagagtctttttggttcaaatttggtttttagttaattatgtgatgtgtatatgattttttgttaccttttctgtatagatatcaggagaatcgaaaatatgttgatggtggaattgtggtatgacatttttactgactactactctgcaaaagttttatctatgagctctatgggttgttcctggcttttgaaaatttactttaaggaagtgtttttggaaatggattataagtatacaagtatgcaatcttatgtatttgcaactgtctaagatgttatgatactttcctccctgcaatctggcattcatccattcaagacattttaattgaactcttacaatgttcttaatactatgataagccctgaaggtaaactgtgactaaaaatgttgcaggataaaatacaggattcctagttaaatttgaattttagataaacaacattcttatactaaaaattattccatgtttatctgaaattcaaatttagctgagtgtcctgtaactttttattttatttgtttacttgtttgtctgtgataaatatggcagccctagtaaaaataaatatagcccctg

SEQ ID NO: 12768 - protein, 52 aa, Homo sapiens
MTPAYGSEVTKENYQDGSPYNQMLINILHYILKMNFYKGNCLCKWCVPFDMY

SEQ ID NO: 12769 - DNA, 6981 bp, Homo sapiens
cctcccgccgccctgctccggggcggtcctagccgctcaccgcaagaagaaaagccacccgttcgtccccctcccctacctcccatcctttgcccaggagctgccttggcagtcacgccccttccttccgaggagctttctggctgcctaaactggtagaccccctgaattactcctccatctccgctctctttcgcctcctcttctcttagttctctccgcctccccctcaactaccaccacctccagtcagtctcgcctccggctatccgctgctccaccctctggcccggtatcctgcctgtccgctgccaccaaggagagcccggacggagcagcgaggaggggagcagccgggagttggggcttcccccctgcccatccctggccgctggcccgggaccgaagccacttgagcgagcagagagtcgtcaccttgtcttctttgccttcagggagctgctaagaaggacaaataagatagcagagtgaaagagcttttgtctccttagaaggaaggctgagaaactaaaggccagcgcaggacatctcattgccattgtcagccaggaactcgcagcctcacagccctacttcttctctgacctctggggggtccttgcccttgctacaatctccaccatccactagattgtctcctgcccgacaccccttggtcccaaaccagggagaccattcagctcacctgcctaggccgcagcagcatttccttcctaatcaggctcaccagggggatcattaccgtctctcccaacctggcctgagtcagcagcagcagcaacagcagcagcagcaccatcatcaccatcaccaccaacaacagcagcagcagcagccacagcagcagccaggagaagcctattcagctatgcctcgggctcagccatcctctgcttcttatcagccagtgccagcagacccttttgccattgtttccagagcccagcagatggttgagatcctctcagacgagaaccggaacttgaggcaagagttggaaggatgctatgagaaggtggcaagactgcagaaggtggagacagaaatccagcgcgtctcggaggcatatgagaacctcgtgaagtcatcctccaaaagagaggccctagagaaagccatgagaaacaagctagagggcgagattcggaggatgcatgatttcaacagggatctgagagagcgtctagagactgccaacaagcagcttgcagagaaggaatatgaggggtcagaggacaccagaaaaaccatctcgcagctctttgcaaaaaataaagaaagccagcgtgagaaggagaagctggaagcggagctggccactgcccgttctaccaatgaggaccaaagacgacacatcgaaatccgagatcaggccctgagtaatgcccaggccaaggtggtaaagctggaagaagagctgaaaaagaagcaagtgtacgttgacaaggtggagaagatgcagcaggcccttgtacagctccaggcagcatgtgaaaaacgtgagcagctagagcaccgtctccggacacgactggagagggaactggaatccctgagaatccagcagcgtcagggcaactgtcagcccaccaacgtttcagaatacaatgctgctgcactgatggagctccttcgggagaaagaggagaggattctggctctggaagctgatatgacaaagtgggagcagaaatatttggaggagaatgtgatgagacattttgctctggatgctgctgcaactgtggctgctcagagggacacaacagtcatcagtcactctcctaacaccagctatgacacagctctagaagctcgcatccagaaagaggaggaagaaatcttgatggccaataagcgttgccttgacatggagggcaggattaagaccctccatgcccagattattgagaaggatgccatgatcaaagtactccagcagcgttcccggaaggagccgagcaagacagagcagctgtcgtgcatgcggccagcgaagtctctgatgtccatttccaatgctggatcaggcttgctctcccactcatccaccctgactggctcccccatcatggaagaaaagcgagacgacaagagctggaaggggagcctaggcattctcctgggtggagactaccgtgctgaatatgtcccttccacaccctcgcctgtgccaccctcgactcccctgctctcggctcactccaagacaggcagccgagactgcagtacccaaactgaacgtgggacggaatcgaacaaaactgcagctgttgctcccatctctgttcctgctccagttgctgctgccgccactgctgccgccatcactgccactgctgccaccatcaccaccaccatggtagctgctgctccagttgctgttgctgctgctgctgctccagctgctgctgctgccccgtctccagccactgccgctgctactgctgctgctgtttctccagctgctgctggtcagattccagctgctgcctctgttgcctcagctgctgccgttgctccttctgctgctgctgctgctgctgttcaggttgctccagctgctccggctccagttccagctccggctctggttccggttccagctccagcagcggctcaggcttctgctcctgctcagactcaggcaccaacttcagctccggctgtggctccaactccagctccaactccaactccagctgtggctcaggctgaggttcctgcaagtccagctaccggtcctggaccacatcgtttgtctataccaagtttgacctgcaatccagacaaaacagatgggcctgtgttccactccaatactctggaaagaaaaactcccattcagatcctgggacaagagcctgatgcagagatggtggaatatctcatctaaacggccaaatcaagagctgcagattatcagcaaaaatgcttttaatcattttcccccttttattggttcttgttttgagggtgaggacaagggttgtggggaggggatgttttttaacaggactttttattggaacaatgtactacttgagtaataccatgtgaacaccagtctattttggtatgcttagggagtacctctaaagacagattaatcagaatgtgctctaaagcttattgtttgaatttatacgaatactgggactgttaacaggtggctatacatcgacgttttcaatgtgcttaaatttgtttaaattttccatattctagatcattttttattgaagagcacagtatgtgtggaagacagtgtataacacgtagtttggaagtgggaagctagagagaattgagtgtgtgctgttttgtatagttactatcctgtgcagcagctggagaaagcactcacctcaggcttacaaaagggaatagtttcaggagctatgtaagctggaaaaaaggtagggagttttggggtgcagaagggtactggagctaattttttcttccagtttcccagctaccctgccccagggaattgtgtttgtcttcatttcagtggtgctttggaaatggattcttttggttccctcctggaggttcatacattcatatatatgctctggagtaatttatgcatttggataattaatatattgctttcagatgctgggagagtacattaactgagtgatgcgcaacttcctctctcttagggaattagaccatcagaggccttgatggagagttgcatggggtgctatatgcagacttccatggtttgtgtgtagccatgaacacagcttgcttgcatttagtaagaccaatcagcttagtgtttatttcttctacagcacagattcactggctgggtctccagtctcaaattgccaatcatttgcaaagtgaggaaggatctttgttgacaggttgaatgctttgaatttctggtgactactttgaaataacttgttttgtttgtcaaattctaagcatatgtcttaaaaggcatttttgactatcacctccaagggaatagcttgagaaacccaaagtactatgctgcagtcgggggagaggtggattgcagcagtatcctcaactacctcttctcactgtcagtgacaccatcttggaatacctttgggaagcagcaggaaatgtgcatgtgggtagagatcaaaggaggcaatggctccaagccttgccatagggctgcctccaaggacacagaaggatgccagttgccacaggtccctgccctgtgtcacctgtctgcccttcattaaggtgagaaatctgcagatagcatcattaagatcagttttaaggggtatagggagggtgagggaagtggggggtgttaggtaagggttgggggtagaggttttgggatgtcttagttagaaaccagattaatagaagagtaggcctgatatattacatcatgagccatagtggtgggaaagaactttagcaatatagccctacctcctcattttagtgatgaggaatctgagaactggagaggttcagtgactttttgaaagtcatacaacacagctaaccattatgccaatcaccatgcttattttgggaaactctttatcttttttaaattccattttatgaaaaggcatcttcatggtccagggaatatgtatcttgtaaaatgtacctggttggagtagcttgtccagtcttgacaaactactgaatttctgtcttgcctctccttcagtgccttttaaaaggttttcccttttctgatctgcatttcaacatagagtcacataaatgtccccctgagaaaccaatcccacttctttctaggagattgggtatcttagataatcttttggggttcctctgtgagtataggaatggtatccttcctaattatcttccaaaggaattattttgtgtgtgtgcctgtgtgtgtgtagagacataaaggagggtgatgtgattttcagctagtcctttcacattttcaataatgaggtaatcatgttacatacacattagtcctcagttataaagtgaatctcagatagaaattaaaagtgcagttgtgttaagactctttcatactaccctttagtcataaggagaaaaaaacactcaaatagtagaagcagcaagtagcaaacttcaggagagctactttctatccaaataatttaaaaaacacttttcacctactcctttcatggttataacacattggcagactttttgctggctctgggagccatgattttaatcacattctgcaaggtgacaaatgtcatacattccacattgtgtggtagccatctctttagactcatgtgttttggggaaaggaagaagttcttggctgagtactattttgaactttccagaaccctctcacaccagagacagttcttctctgttcagtttccaatccccgataatttgctaaaataacattgtacatccaagagagggaagaagagtatgtcagtatattatgcagaagatagatacagccttttcagaagatctccactagtttttgttccaaaaattcaagtttatgggagaaatctcaattagccaccttttcacagttgtgtggatataacatttgggggatctttctggactcctacctatctgtgcattttaccggcacctcaggaaaggagggtgaccaggttgtcttagcttgtactgcttggtgatctctgaggaccttctaattcagttgtaccccagtgttccatgtatagaaaaacttcattagaacaaactttacttgatatgaaactcctattaacagtctttttttgaaataaaaagtagcttgagctttcttttaaaatcatgtatcttgattgttgatttaatgaaggatttccttttaatgctgcttttgagcttcaaggtaataggacagcaggaacctaaaatatctgccatcatctgccataggaaagatacccagagacccatcatgttctctttttgttgttacactgttgggtgggtataacaattggaaaatgaacaaactgattgattgtgcaaactactttttatgacaagcctaaaccctcataatgcggcagcttaaagtgtatacatatgcactaactttgatcaattatattctcatatctgttagctacacagtctcctattatctcaattgcttatgtgcatatggaatatgttacttaaaacgtgtgcattcttactgaaaatgttttcaaaggaaggtatcagctgtgggctaattgccaccaatttcagcctgccacgattcttggaaatatgtcttccaagtgccatccatcatcagtaggacaagtgtcgggagtttgtttatttttttccagtagcaacgatgggttacatggagccatgaaacctccttctggcctcccttgtgattaatggcatgtgtttgtaaaatggatagctggggttggcagatggctagagaagaatcgcctttggtttaaaatgtatgtggtcccctaatgattgtgaccccattctgtaatcaactgagctagttccaataaagttaagcaggtttaaatccactttgtgcctatcttttcactgacaataaagttagctattttaaaatgcagtaccgtgtggaaaatgctttggtgtttacccgacagaggctttatttgtgctgtatcagtgattactttcaattcagtatgcagtgaaattgcctttcaagggcagcgtgcagcagaatttgcatttgcttgaagtatggaatgtgattatagattataaagtattaagacaacaccacaggccgcatgctctaatcggtctctttatatactcaggcagcatatattaaaagctttgcatctttttatcttctggtttctagggataaaatgatggccacccaaagcagagaatttatcctttggttagcattttggaaggccccttgatattccttttgtacccttgttctgatgccaattcatcagtttt

SEQ ID NO: 12770 - protein, 675 aa, Homo sapiens; identical to SEQ ID NO: 2199

SEQ ID NO: 12771 - DNA, 1728 bp, Homo sapiens
tgggaaagaactttagcaatatagccctacctcctcattttagtgatgaggaatctgagaactggagaggttcagtgactttttgaaagtcatacaacacagctaaccattatgccaatcaccatgcttattttgggaaactctttatcttttttaaattccattttatgaaaaggcatcttcatggtccagggaatatgtatcttgtaaaatgtacctggttggagtagcttgtccagtcttgacaaactactgaatttctgtcttgcctctccttcagtgccttttaaaaggttttcccttttctgatctgcatttcaacatagagtcacataaatgtccccctgagaaaccaatcccatttaatcacattctgcaaggtgacaaatgtcatacattccacattgtgtggtagccatctctttagactcatgtgttttggggaaaggaagaagttcttggctgagtactattttgaactttccagaaccctctcacaccagagacagttcttctctgttcagtttccaatccccgataatttgctaaaataacattgtacatccaagagagggaagaagagtatgtcagtatattatgcagaagatagatacagccttttcagaagatctccactagtttttgttccaaaaattcaagtttatgggagaaatctcaattagccaccttttcacagttgtgtggatataacatttgggggatctttctggactcctacctatctgtgcattttaccggcacctcaggaaaggagggtgaccaggttgtcttagcttgtactgcttggtgatctctgaggaccttctaattcagttgtaccccagtgttccatgtatagaaaaacttcattagaacaaactttacttgatatgaaactcctattaacagtctttttttgaaataaaaagtagcttgagctttcttttaaaatcatgtatcttgattgttgatttaatgaaggatttccttttaatgctgcttttgagcttcaaggtaataggacagcaggaacctaaaatatctgccatcatctgccataggaaagatacccagagacccatcatgttctctttttgttgttacactgttgggtgggtataacaattggaaaatgaacaaactgattgattgtgcaaactactttttatgacaagcctaaaccctcataatgcggcagcttaaagtgtatacatatgcactaactttgatcaattatattctcatatctgttagctacacagtctcctattatctcaattgcttatgtgcatatggaatatgttacttaaaacgtgtgcattcttactgaaaatgttttcaaaggaaggtatcagctgtgggctaattgccaccaatttcagcctgccacgattcttggaaatatgtcttccaagtgccatccatcatcagtaggacaagtgtcgggagtttgtttatttttttccagtagcaacgatgggttacatggagccatgaaacctccttctggcctcccttgtgattaatggcatgtgtttgtaaaatggatagctggggttggcagatggctagagaagaatcgcctttggtttaaaatgtatgtggtcccctaatgattgtgaccccattctgtaatcaactgagctagttccaataaagttaagcaggtttaaatccactttgtgcctatcttttcactgacaataaagttagctattttaaaatgca

SEQ ID NO: 12772 - protein, 53 aa, Homo sapiens
MSYIPHCVVAISLDSCVLGKGRSSWLSTILNFPEPSHTRDSSSLFSFQSPIIC

SEQ ID NO: 12773 - DNA, 1677 bp, Homo sapiens
tgggaaagaactttagcaatatagccctacctcctcattttagtgatgaggaatctgagaactggagaggttcagtgactttttgaaagtcatacaacacagctaaccattatgccaatcaccatgcttattttgggaaactctttatcttttttaaattccattttatgaaaaggcatcttcatggtccagggaatatgtatcttgtaaaatgtacctggttggagtagcttgtccagtcttgacaaactactgaatttctgtcttgcctctccttcagtgccttttaaaaggttttcccttttctgatctgcatttcaacatagagtcacataaatgtccccctgagaaaccaatcccatttaatcacattctgcaaggtgacaaatgtcatacattccacattgtgtggtagccatctctttagactcatgtgttttggggaaaggaagaagttcttggctgagtactattttgaactttccagaaccctctcacaccagagacagttcttctctgttcagtttccaatccccgataatttgctaaaataacattgtacatccaagagagggaagaagagtatgtcagtatattatgcagaagatagatacagccttttcagaagatctccactagtttttgttccaaaaattcaagtttatgggagaaatctcaattagccaccttttcacagttgtgtggatataacatttgggggatctttctggactcctacctatctgtgcattttaccggcacctcaggaaaggagggtgaccaggttgtcttagcttgtactgcttggtgatctctgaggaccttctaattcagttgtaccccagtgttccatgtatagaaaaacttcattagaacaaactttacttgatatgaaactcctattaacagtctttttttgaaataaaaagtagcttgagctttcttttaaaatcatgtatcttgattgttgatttaatgaaggatttccttttaatgctgcttttgagcttcaaggtaataggacagcaggaacctaaaatatctgccatcatctgccataggaaagatacccagagacccatcatgttctctttttgttgttacactgttgggtgggtataacaattggaaaatgaacaaactgattgattgtgcaaactactttttatgacaagcctaaaccctcataatgcggcagcttaaagtgtatacatatgcactaactttgatcaattatattctcatatctgttagctacacagtctcctattatctcaattgcttatgtgcatatggaatatgttacttaaaacgtgtgcattcttactgaaaatgttttcaaaggaaggtatcagctgtgggctaattgccaccaatttcagcctgccacgattcttggaaatatgtcttccaagtgccatccatcatcagtaggacaagtgtcgggagtttgtttatttttttccagtagcaacgatgggttacatggagccatgaaacctccttctggcctcccttgtgattaatggcatgtgtttgtaaaatggatagctggggttggcagatggctagagaagaatcgcctttggtttaaaatgtatgtggtcccctaatgattgtgaccccattctgtaatcaactgagctagttccaataaagttaagcaggtttaaatcc

SEQ ID NO: 12774 - protein, 53 aa, Homo sapiens; identical to SEQ ID NO: 12772

SEQ ID NO: 12775 - DNA, 994 bp, Homo sapiens
cctcccgccgccctgctccggggcggtcctagccgctcaccgcaagaagaaaagccacccgttcgtccccctcccctacctcccatcctttgcccaggagctgccttggcagtcacgccccttccttccgaggagctttctggctgcctaaactggtagaccccctgaattactcctccatctccgctctctttcgcctcctcttctcttagttctctccgcctccccctcaactaccaccacctccagtcagtctcgcctccggctatccgctgctccaccctctggcccggtatcctgcctgtccgctgccaccaaggagagcccggacggagcagcgaggaggggagcagccgggagttggggcttcccccctgcccatccctggccgctggcccgggaccgaagccacttgagcgagcagagagtcgtcaccttgtcttctttgccttcagggagctgctaagaaggacaaataagatagcagagtgaaagagcttttgtctccttagaaggaaggctgagaaactaaagagtgaccagtggttggactcttggcggcgcttaccctgaacctgagtgttaggggagagggaatctgccgttgcggtttctggagctgctcataagcaagaattccctatcctgatcaaggctttaagcctaaaagaaagcagaaataggtcaagggcagcccaggtgcccaatttctctctctcttcacaaggcaccaccagcaatagagatgagaaattctgaagaacagccaagtggagggaccacggtattgcagcgtttgctacaagagcagcttcgctatggcaatcctagtgagaatcgcagcctgcttgccatacaccagcaagccacagggaatggccctcctttccccagtggcagtgggaacccgggccctcagagtgatgtgttgagtccccaagaccaccaccaacagcttgtggctcatgctgctcgacaagaaccccaggggcag

SEQ ID NO: 12776 - protein, 82 aa, Homo sapiens
MRNSEEQPSGGTTVLQRLLQEQLRYGNPSENRSLLAIHQQATGNGPPFPSGSGNPGPQSDVLSPQDHHQQLVAHAARQEPQG

SEQ ID NO: 12777 - DNA, 4562 bp, Homo sapiens
ataaatgttcccacccctgggcaaggtggctcactctggcaggtaggaacaggggagagtgcacctgctaccagtcaagctcagccagactgcaagaggaggcgaggcggagccagccgagggagtgaaccatggacaagttgaaatgcccgagtttcttcaagtgcagggagaaggagaaagtgtcggcttcatcagagaatttccatgttggtgaaaatgatgagaatcaggaccgtggtaactggtccaaaaaatcggattatcttctatctatgattggatacgcagtgggattaggaaatgtgtggagatttccatatctgacctacagcaatggtggaggcgccttcttgataccttatgcaattatgttagcattggctggtttacctttgttctttctggagtgttcactgggacaatttgctagcttaggtccagtttcagtttggaggattcttccattgtttcaaggtgtgggaattacaatggtcctgatctccatttttgtgacaatctattacaatgtcataattgcctatagtctttactacatgtttgcttcttttcaaagtgaactaccatggaaaaattgttcttcgtggtcagataaaaactgtagcagatcaccaatagtaactcactgtaatgtgagtacagtgaataaaggaatacaagagatcatccaaatgaataaaagctgggtagacatcaacaattttacctgcatcaacggcagtgaaatttatcagccagggcagcttcccagtgaacaatattggaataaagtggcgctccaacggtcaagtggaatgaatgagactggagtaattgtttggtatttagcactttgtcttcttctggcttggctcatagttggagcagcactatttaaaggaatcaaatcgtctggcaaggtggtatattttacagctcttttcccctatgtggtcctactcatcctgttagtacgaggtgcaactctggagggtgcttcaaaaggcatttcatactatattggagcccagtcaaattttacaaaacttaaggaagctgaggtatggaaagatgctgccactcagatattttactccctttcagtggcttggggtggcttagttgctctatcatcttacaataagttcaaaaacaactgcttctctgatgccattgtggtttgtttgacaaactgtctcactagcgtgtttgctggatttgctattttttctatattgggacacatggcccatatatctggaaaggaagtttctcaagttgtaaaatcaggttttgatttggcattcattgcctatccagaggctctagcccaactcccaggtggtccattttggtccatattattttttttcatgcttttaactttgggtctcgattctcagtttgcttcgattgaaacgatcacaacaacaattcaagatttatttcccaaagtgatgaagaaaatgagggttcccataactttgggctgctgcttggttttgtttctccttggtctcgtctgtgtgactcaggctggaatttactgggttcatctgattgaccacttctgtgctggatggggcattttaattgcagctatactggagctagttggaatcatctggatttatggagggaacagattcattgaggatacagaaatgatgattggagcaaagaggtggatattctggctatggtggagagcttgctggtttgtaattacgcctatccttttgattgcaatatttatctggtcattggtgcaatttcatagacctaattatggcgcaattccataccctgactggggagttgctttaggctggtgtatgattgttttctgcattatttggattccaattatggctatcataaaaataattcaggctaaaggaaacatctttcaacgccttataagttgctgcagaccagcttctaactggggtccatacctggaacaacatcgtggggaaagatataaagacatggtagatcctaaaaaagaggctgaccatgaaatacctactgttagtggcagcagaaaaccggaatgagatctcattgaaaaaaatatatgattgtataatgtgattttttttagaatagggggaaccttatttatttgtgtgttaactgaataggaaaatgtacatactatgttcatgatagtgtgatttttttcacatttaagcaggaatgcaatataaaaatgtgaatctcttaattctcagccatgtgcttattatatttctttttagattgtctatctgtataacacacacacacacacctaagagtctctatttcacaattatatttttgtaaatagtatatgcatttttaatacattggaggctttattttgaactaatttcttagagaatagttatattttctattacacaagtttaaaaatattattaacttgtattttcttaatatacaatctatcttttccacaaatatgagtgggaaataaatcagcacatttgaaagaaagtgttaaaactgaaggcctcacttaattagaaacgtgataaatatatggacaaatggactatacatactataagaggactgtagtttaatactttttacccaaatatgtttaaaaacttcgtgcatttgttacagctcatgttttctatatgaacttagtcattaatgttctttataaaaagtgaaataagatggaaaaataaggatcctacagccagtaagtgataaatctagaaaattgagttttgagtacctcttttcccatatacaatcttccttccttaggtaatttggaagaaaactatgacccatttaatttctattgtgtttcacaaaattaagtgttgttcattatactctctgaaatataggtttaatttcaaatagaatatggacttaaatgttaatgagaaaatggctttaatcaattctagcattttattactgtaatacagggctgatagagtgattttgtcttatatgagtaagttactacttacaggtgataacttgcatactattggaagataaacttgtcaaacttgtcaagaatgagaaaagccaaattagaaaatcctatgtcctagtttccttaccaaggataattaaatatatcactaagagctttatatattgattatatattgttgacaactggtttaagcatcatagcctatgatgataaacactgcctatatatgtaaatagcttttcatcaattcttaaatttcttaacctaggcttcagggagcatatgaaaccaaaattatatggaacattttctgtgtgtacatgtacatgcatttttctagggagagagtccgtaggtttatcagaatatcaaggaaaactgtgacccaaagaagtttaagaatcacatacagtgctgctggctttttgtgcttggcaaatgagtgacaatagaagaaataatttttcttacacattttaaaacgttttctcttccttgtgattgaagatgaaaggagtaagaaattaaggcatttgtttaatttatactggtaacttatttaggggggaggggacatgaaggtaggtaaataggtaggcctctaattgaaccacctctctaagttatgtacgtatatataagctgaaattgtgtttgacattctgagggttttctttttcttttttctttttttttttttttggtggggggctgggggtcagagtcttgttctgttgcctgggctggagtgcagtggcatgatctcagctcactgcaacctctgccttctggattcaagtgattctcctgcctcagcctcttgagtagctgggactacaggtgcccgccaccacaccagctaatttttgtatttttagtagaggcgaagtttccccatgttggccaggctggtcttgaactcccgacctcaagtgatctgtctacctcggcctcctaaagtgctgagattacaggtgtgagccaccgtgcccggcccattctaagggttttctttgaagacaggtcaaatgctgttagtaagtttcaggagattgttaattcctcagttataccagattttataaaatatttgagaatagatggctaacaagaggttagaaatacttttccttaattttaatccacagtatgttacatgcattctaccactacattttggtgctatttaaggtgtgcaattttctataggtgacttttgcaattcagggaagatttgggcatattaaatgaaagaatatctaattgggggaggtgtgaagggaaagaaattcttttcaaaagctgaccacaaagagtagttaaaagtttttgtcactatcttcacaagtgtgtaaagcacagatttcaacagagtgcttggcatattgtagggtgctcaatggtggtttttattattattactcagattccacagtggcaagaaacatcattctacataatggaaaacatttacatcaaatcccacttactttaatgcgaacttggagataatttatggtattgtattgtaaaccattaatgaaaactttttcacagttgagtgaaattaaaatcactatatctc

SEQ ID NO: 12778 - protein, 642 aa, Homo sapiens; identical to SEQ ID NO: 2201

SEQ ID NO: 12779 - DNA, 10805 bp, Homo sapiens; identical to SEQ ID NO: 2202

SEQ ID NO: 12780 - protein, 2725 aa, Homo sapiens; identical to SEQ ID NO: 2203

SEQ ID NO: 12781 - DNA, 2280 bp, Homo sapiens
agagacgctgacaaaggagcggaggagcagtcgcagctgctttccgaggaagccggtgttgccgagattgccaaaatgctttggagtttttaactgaatctaagaaaagtccaaaatagatttgagactgtaaaaacagaaactgcagcaagggggattcagtgccaatgcatcaacaaaaaagacaaccagagttagtggaaggaaatcttcctgttttcgtgttccccacggagctcatattttatgcagatgatcagtcaacacataagcaagtgttgacactgtacaatccctatgagtttgccttaaagttcaaagtgtgattcgtcatcgagatgttcgatcctgtcactatggtgtaatagacaaattccgtctccaagtttccgagcaaagccaaaggaaggctttgggaagaaaagaggttgttgctactcttctcccatcagcaaaagaacaacaaaaggaagaagaggaaaaaagattaaaggaacatttaactgaaagtttattttttgagcagtcgtttcaaccagaaaacagagctgtatcctcaggacctagtttactaactgtcttcctgggagtggtgtgcattgcagccctgatgctgcctacactgggggatgtggaatcgctggtgcctctctacctccacttaagtgtgaatcaaaaattagtggctgcttatatcttaggtcttatcacaatggccatacttagaacatgagcaaggatttcaattgacttctgaagtaaatctgtcttgaaaatatgaatgtggactgccttttatctctatttcactccattaacatgcaacaaactattgaatgatttcaaataattgcaaatgtataatatatattttaaattataatttaatttgaaggactgcagaacattattttacagacagcaaggatgcttctgagtgacacctaggaaattatttgaagaaattctttttatatctatacctgttgtgtaagaaactttaaaacatttgttattttctcacctttttttctaattcactttgattgctaggggtcatgtatgcttcgaagttacaggactaaaagagcaaactgaccggcctaaaactaaaatgacatttattccctagctacaaacatcagcgttattatgttaattataccttgccctctatcattataaatggttgccatggtgtttctaaaaataagtgttttaccattaatgtgtagagggcaaacaaagcataaagtactaagggatcatgcttatcctagggtctcacagaagagaggacatatttaattaatcttgtgaattacagaacaggttgtggtccagacaccaagaatcataggggtttttttttaaaaaacctaatagaagtagggtgacctctctctttggtctaagagttctaaaggaaggtaggcatctgtttaattagttggttcaccctggctttacctctggttaatgctttgtgttaataggaaggaaaaatcactttatcttttcttccaagcccctccctgcctgacttacccagactgggattaccagataccaggtgatttatgtggagatgatttttcacctttaaactctaagccaagtgtaagaaactcttgatagctatgtctattttatatcagtcactgagacttttttttaagtttttatttattattaagacaactttgccaaaaaagtcccctaagcacaactatttacatttctttatagcctcttctgatctctaacacatatgcagttttaactgttattttcatagtaactgatcttttgtctaaggatttttacctgaaagcacaatgtattgagtctcttgaaaatcatctttcagatctttttacagaatgaacttatgcactgctactgtagtattctcaaggaatatatgtaaacacaaatgtatgcctgaggttggtttttgcagaaaacagtctctgcttctaaaaacttctatgtctagtcttccataggaaatcctcactgtttaaccatgtgaggagcctaagtcattaaacggatcatgtctgtacattgtgtaatgaatgaaaagcacataaatgtaatctactttgaactttgtaaaaatgatgtgtggaggctattcttgtttctccatctcaagtcctgtgtgtgcacgtgtgtgcaagtgcacatgtgtgtgtgtaataacacattgtaaagaacagaaattactttaaaaaataaacagaaatggagacctgagcttcacattgatttaaa

SEQ ID NO: 12782 - protein, 52 aa, Homo sapiens
MHQQKRQPELVEGNLPVFVFPTELIFYADDQSTHKQVLTLYNPYEFALKFKV

SEQ ID NO: 12783 - DNA, 2453 bp, Homo sapiens
cttcctctcgcctcccacccccgagccgcggctcatcctctagggcggagagaggtggcatttgagtcctccggtatcccagcaggcagtgcagcctagagacgctgacaaaggagcggaggagcagtcgcagctgctttccgaggaagccggtgttgccgagattgccaaaatgctttggagtttttaactgaatctaagaaaagtccaaaatagatttgagactgtaaaaacagaaactgcagcaagggggattcagtgccaatgcatcaacaaaaaagacaaccagagttagtggaaggaaatcttcctgttttcgtgttccccacggagctcatattttatgcagatgatcagtcaacacataagcaagtgttgacactgtacaatccctatgagtttgccttaaagttcaaagttttgtgtactactccaaataagtatgttgtcgttgatgctgcaggtgcagtaaagcctcagtgttgtgtggatattgtgattcgtcatcgagatgttcgatcctgtcactatggtgtaatagacaaattccgtctccaagtttccgagcaaagccaaaggaaggctttgggaagaaaagaggttgttgctactcttctcccatcagcaaaagaacaacaaaaggaagaagaggaaaaaagattaaaggaacatttaactgaaagtttattttttgagcagtcgtttcaaccagaaaacagagctgtatcctcaggacctagtttactaactgtcttcctgggagtggtgtgcattgcagccctgatgctgcctacactgggggatgtggaatcgctggtgcctctctacctccacttaagtgtgaatcaaaaattagtggctgcttatatcttaggtcttatcacaatggccatacttagaacatgagcaaggatttcaattgacttctgaagtaaatctgtcttgaaaatatgaatgtggactgccttttatctctatttcactccattaacatgcaacaaactattgaatgatttcaaataattgcaaatgtataatatatattttaaattataatttaatttgaaggactgcagaacattattttacagacagcaaggatgcttctgagtgacacctaggaaattatttgaagaaattctttttatatctatacctgttgtgtaagaaactttaaaacatttgttattttctcacctttttttctaattcactttgattgctaggggtcatgtatgcttcgaagttacaggactaaaagagcaaactgaccggcctaaaactaaaatgacatttattccctagctacaaacatcagcgttattatgttaattataccttgccctctatcattataaatggttgccatggtgtttctaaaaataagtgttttaccattaatgtgtagagggcaaacaaagcataaagtactaagggatcatgcttatcctagggtctcacagaagagaggacatatttaattaatcttgtgaattacagaacaggttgtggtccagacaccaagaatcataggggtttttttttaaaaaacctaatagaagtagggtgacctctctctttggtctaagagttctaaaggaaggtaggcatctgtttaattagttggttcaccctggctttacctctggttaatgctttgtgttaataggaaggaaaaatcactttatcttttcttccaagcccctccctgcctgacttacccagactgggattaccagataccaggtgatttatgtggagatgatttttcacctttaaactctaagccaagtgtaagaaactcttgatagctatgtctattttatatcagtcactgagacttttttttaagtttttatttattattaagacaactttgccaaaaaagtcccctaagcacaactatttacatttctttatagcctcttctgatctctaacacatatgcagttttaactgttattttcatagtaactgatcttttgtctaaggatttttacctgaaagcacaatgtattgagtctcttgaaaatcatctttcagatctttttacagaatgaacttatgcactgctactgtagtattctcaaggaatatatgtaaacacaaatgtatgcctgaggttggtttttgcagaaaacagtctctgcttctaaaaacttctatgtctagtcttccataggaaatcctcactgtttaaccatgtgaggagcctaagtcattaaacggatcatgtctgtacattgtgtaatgaatgaaaagcacataaatgtaatctactttgaactttgtaaaaatgatgtgtggaggctattcttgtttctccatctcaagtcctgtgtgtgcacgtgtgtgcaagtgcacatgtgtgtgtgtaataacacattgtaaagaacagaaattactttaaaaaataaacagaaatggagacctgagcttcacattgatttaaa

SEQ ID NO: 12784 - protein, 213 aa, Homo sapiens; identical to SEQ ID NO: 2205

SEQ ID NO: 12785 - DNA, 2291 bp, Homo sapiens
cttcctctcgcctcccacccccgagccgcggctcatcctctagggcggagagaggtggcatttgagtcctccggtatcccagcaggcagtgcagcctagagacgctgacaaaggagcggaggagcagtcgcagctgctttccgaggaagccggtgttgccgagattgccaaaatgctttggagtttttaactgaatctaagaaaagtccaaaatagatttgagactgtaaaaacagaaactgcagcaagggggattcagtgccaatgcatcaacaaaaaagacaaccagagttagtggaaggaaatcttcctgttttcgtgttccccacggagctcatattttatgcagatgatcagtcaacacataagcaagtgttgacactgtacaatccctatgagtttgccttaaagttcaaagttttgtgtactactccaaataagtatgttgtcgttgatgctgcaggtgcagtaaagcctcagtgttgtgtggatattgtgattcgtcatcgagatgttcgatcctgtcactatggtgtaatagacaaattccgtctccaagtttccgagcaaagccaaaggaaggctttgggaagaaaagaggttgttgctactcttctcccatcagcaaaagaacaacaaaaggaagaagaggaaaaaagattaaaggaacatttaactgaaagtttattttttgagcagtcgtttcaaccaggtcttatcacaatggccatacttagaacatgagcaaggatttcaattgacttctgaagtaaatctgtcttgaaaatatgaatgtggactgccttttatctctatttcactccattaacatgcaacaaactattgaatgatttcaaataattgcaaatgtataatatatattttaaattataatttaatttgaaggactgcagaacattattttacagacagcaaggatgcttctgagtgacacctaggaaattatttgaagaaattctttttatatctatacctgttgtgtaagaaactttaaaacatttgttattttctcacctttttttctaattcactttgattgctaggggtcatgtatgcttcgaagttacaggactaaaagagcaaactgaccggcctaaaactaaaatgacatttattccctagctacaaacatcagcgttattatgttaattataccttgccctctatcattataaatggttgccatggtgtttctaaaaataagtgttttaccattaatgtgtagagggcaaacaaagcataaagtactaagggatcatgcttatcctagggtctcacagaagagaggacatatttaattaatcttgtgaattacagaacaggttgtggtccagacaccaagaatcataggggtttttttttaaaaaacctaatagaagtagggtgacctctctctttggtctaagagttctaaaggaaggtaggcatctgtttaattagttggttcaccctggctttacctctggttaatgctttgtgttaataggaaggaaaaatcactttatcttttcttccaagcccctccctgcctgacttacccagactgggattaccagataccaggtgatttatgtggagatgatttttcacctttaaactctaagccaagtgtaagaaactcttgatagctatgtctattttatatcagtcactgagacttttttttaagtttttatttattattaagacaactttgccaaaaaagtcccctaagcacaactatttacatttctttatagcctcttctgatctctaacacatatgcagttttaactgttattttcatagtaactgatcttttgtctaaggatttttacctgaaagcacaatgtattgagtctcttgaaaatcatctttcagatctttttacagaatgaacttatgcactgctactgtagtattctcaaggaatatatgtaaacacaaatgtatgcctgaggttggtttttgcagaaaacagtctctgcttctaaaaacttctatgtctagtcttccataggaaatcctcactgtttaaccatgtgaggagcctaagtcattaaacggatcatgtctgtacattgtgtaatgaatgaaaagcacataaatgtaatctactttgaactttgtaaaaatgatgtgtggaggctattcttgtttctccatctcaagtcctgtgtgtgcacgtgtgtgcaagtgcacatgtgtgtgtgtaataacacattgtaaagaacagaaattactttaaaaaataaacagaaatggagacctgagcttcacattgatttaaa

SEQ ID NO: 12786 - protein, 159 aa, Homo sapiens
MHQQKRQPELVEGNLPVFVFPTELIFYADDQSTHKQVLTLYNPYEFALKFKVLCTTPNKYVVVDAAGAVKPQCCVDIVIRHRDVRSCHYGVIDKFRLQVSEQSQRKALGRKEVVATLLPSAKEQQKEEEEKRLKEHLTESLFFEQSFQPGLITMAILRT

SEQ ID NO: 12787 - DNA, 743 bp, Homo sapiens
gtagtggaggtctagtgtggcaggctcaaattgaatatacacaggcaagccactggggtactggaagaaagtatcagaacttcaatttatatttatttttagcacattcttccaaaaatctatttgtatgttttatattaagcataacacagtacagaacttgtgcatataattttaaaatgtgcatacatcgatgatacatgcttgaatactttctactgactagggtgggatggtcgggggagttggtgaccacctttcagtaagaactcactacctcacaatgccacgtcagcattccatcctgcaatgattcagaccagttaagacatgggcttccacatcagcccagcagttaactctcagatggaaaaaatgatggggaaacaattggagaagttagacaaaatcagaatactggtctgtggtggccagtgtttgtgaaggaacttttgtcttaaagtttttagaaggaagcttagggatttttgtctttttacagaaaacagagctgtatcctcaggacctagtttactaactgtcttcctgggagtggtgtgcattgcagccctgatgctgcctacactgggggatgtggaatcgctggtgcctctctacctccacttaagtgtgaatcaaaaattagtggctgcttatatcttaggtcttatcacaatggccatacttagaacatgagcaaggatttcaattgacttctgaagtaaatctgtcttgaaaatatg

SEQ ID NO: 12788 - protein, 40 aa, Homo sapiens
MLPTLGDVESLVPLYLHLSVNQKLVAAYILGLITMAILRT

SEQ ID NO: 12789 - DNA, 1079 bp, Homo sapiens
agtgcagcctagagacgctgacaaaggagcggaggagcagtcgcagctgctttccgaggaagccggtgttgccgagattgccaaaatgctttggagtttttaactgaatctaagaaaagtccaaaatagatttgagactgtaaaaacagaaactgcagcaagggggattcagtgccaatgcatcaacaaaaaagacaaccagagttagtggaaggaaatcttcctgttttcgtgttccccacggagctcatattttatgcagatgatcagtcaacacataagcaagtgttgacactgtacaatccctatgagtttgccttaaagttcaaagttttgtgtactactccaaataagtatgttgtcgttgatgctgcaggtgcagtaaagcctcagtgttgtgtggatattgtgattcgtcatcgagatgttcgatcctgtcactatggtgtaatagacaaattccgtctccaagtttccgagcaaagccaaaggaaggctttgggaagaaaagaggttgttgctactcttctcccatcagcaaaagaacaacaaaaggaagaagaggaaaaaagattaaaggaacatttaactgaaagtttattttttgagcagtcgtttcaaccaggtagttttgggttgtttttaaagcccttttgaggtcttacacattattaactttaaaataatcaggcagctaagaataattactagaaaaatcatctaccacttcaaacatggtcaactacttcaaaactgcacctagagaatcaggtacctgaagtagaacaagaagcctggaggtggactttgagaggagggaatacccctcactggaccaggctgtaaggagcgggtagatgttgctgtagccttttaaatatatctgtatttaaacataaacataaatatatctaagactgcaggcaccatactttatgaagctagtacaatttggcagttcctatacttttgtttccatgactttcctatatcctttctcatttaattagttccaaggaagagagagattgtgtttggcaataggccaagcttagtgcactgttcatattattttgaaa

SEQ ID NO: 12790 - protein, 159 aa, Homo sapiens
MHQQKRQPELVEGNLPVFVFPTELIFYADDQSTHKQVLTLYNPYEFALKFKVLCTTPNKYVVVDAAGAVKPQCCVDIVIRHRDVRSCHYGVIDKFRLQVSEQSQRKALGRKEVVATLLPSAKEQQKEEEEKRLKEHLTESLFFEQSFQPGSFGLFLKPF

SEQ ID NO: 12791 - DNA, 565 bp, Homo sapiens
gacaaaggagcggaggagcagtcgcagctgctttccgaggaagccggtgttgccgagattgccaaaatgctttggagtttttaactgaatctaagaaaagtccaaaatagatttgagactgtaaaaacagaaactgcagcaagggggattcagtgccaatgcatcaacaaaaaagacaaccagagttagtggaaggaaatcttcctgttttcgtgttccccacggagctcatattttatgcagatgatcagtcaacacataagcaagtgttgacactgtacaatccctatgagtttgccttaaagttcaaaggtgagtctcctagctctattttctgggtttttaactggtccctactaattttttacttgtagaaactaattaaaaaaaaaaaacactaatggccattgtgactttttctttcagttttgtgtactactccaaataagtatgttgtcgttgatgctgcaggtgcagtaaagcctcagtgttgtgtggatatgtaagtcaagatcaattcctggtaacacgttttaagtgtgttaatatttatgtttttaacttg

SEQ ID NO: 12792 - protein, 71 aa, Homo sapiens [sequence omitted]

SEQ ID NO: 12793 - DNA, 958 bp, Homo sapiens
agggaatgaaggctggcatctaaactcaatcagcaaaataaattcaataaggaagatttgaagatcaaagaccttcctctctctggcttcacatttctcatcactagttgaaagcctgaaagaacaaaaaagctgacccttccctgagtaagagagaattcttcctgcgtgatgatcttcaatctgggacattgactttttttctgcctttggcctgaaacattggctctccctgggtctcgagcctgcgggcctttggactggaactaaattatcagctctcctgggcctccaggttgtctattcaccctgcagatctttcaacttgccagaccccataattatgtgaaccaattcattataaaaataaatctcgattgctggcaagatggccgaacaggaacagctccggcctgtagctcccagcgagatcgacatagaaggcctaggtcatcaagatgcacagcacaggacagaagcccctctagtcctgcacctggtgacatggaactgctgtgctggtccacacagacacagcctccaaccaagcctggctcctacccatcacagttctgtaggctgcccatttgcagaaggccttccatctgacactcctcctcgcctgcttgttctccagccatgttgtggccaatttgccatgaggaggttgcagtggccaagactgttggaaactgtgcggtgtagctgggagagaaaggacacactctaaatgttcttactgcctgtgacgatgcagctacagcgatgtactagctgctcacaagcctgttccttcttccattgtagggcatgaagaattcccttatcactgggtaagaagggggaacagaagtttttctcatgcctaattttgcgttttcagtaaggtctttttcagcttgtccaggagaaactggaaaaaaaaagatacttgaaataaactgaaggacatttaaac

SEQ ID NO: 12794 - protein, 113 aa, Homo sapiens
MAEQEQLRPVAPSEIDIEGLGHQDAQHRTEAPLVLHLVTWNCCAGPHRHSLQPSLAPTHHSSVGCPFAEGLPSDTPPRLLVLQPCCGQFAMRRLQWPRLLETVRCSWERKDTL

SEQ ID NO: 12795 - DNA, 1622 bp, Homo sapiens
atgggtagccagtatgtgcatcatgctgatgccctggctactgcttttgccataagccacgcggaccccgtggggcggggcggaacctggcagggcgccagtgaccgctggggccagagccctgccgggaaaggagggcttccgccttgcagcgcagctcggatcagcagcagcccaggaggcctcccgcccgtactttcccgcgtccatccctctgtcccacggtcggtgagtcagcggagcctgatggaggccttgggctctgggcactatgtgggaggcagcatcaggtccatggcggcggcggccctgtctggcctggcggtgcggctgtcgcgcccgcaggggacccgcggctcttacggcgccttctgcaagacgctcacgcgcacgctgctcaccttcttcgacctggcctggcggctgcgcaagaacttcttttacttctatattctggcctcggtgattctcaacgtccacctgcaggtatatatttagagccactaactttgtggcatttgggggctcctcgtcaggatggctgacttccacccacctgctcacccaccctagagcaaagcgaccaactccgctcctgcatgcagacttgccactcattctttccattgcctcatcttttagtataaatgggtggcaaaaaaagaaaaaaacagcatttgtggaaagcctgaaatataacccaaatcgtctaagatagaatgaaaaattgactctcaaggaaatatttgaaggaacagaatacagcttaaaaatttgaaaatccttaaaaatatctgagaagtttttgcatccgtaaaacagaaaacagcacgaactttaggaaatgacaatgggcacagaatgcaataaaaaaaaaaaacggggaaaggtaactaaaaacttaaggaaagataaactgaacaagaatggctcagacagcaggcaaatctccccaattagaaacgaagtgaatagacccaattgaatgagatgaattctaagcaatagatggattgaataataagctggaggacattaataacatgttctggaaggcatacatttcttcaacccaaaggaaaaaaaatgacagaaagaaactacagggaagaacattaaaaactgtgcaagaaacttatgtttcacatatgaagcaacctcagatgtggcatggttttgaacagttgccgaaagtgtgagaaagggaatctgtttgaatattggcacatggatcaagactctggagtcggtgatgagaaaatccaatcagagcattccactttgctattcattgaaccaggtagccaacagaagagttaaaaattagtgatatgactatattcagggggaaggagagctgaggggggcggcaggaagtcagcagaaaatgcctcatgtcattaagtcaagaaatagtaataaaggcatgttattgaaaaagggggtgtaatctctaaacaagcacgtgtagaagtttgtgtttctgatttggggaagcaagagttgagaaggagggacagttctattacttttcattatatgtcctttttctactgtttgatttttaaaaactatacacatgtattgcttttgcttcgattaaaaatcaagacattaaaatg

SEQ ID NO: 12796 - protein, 165 aa, Homo sapiens
MGSQYVHHADALATAFAISHADPVGRGGTWQGASDRWGQSPAGKGGLPPCSAARISSSPGGLPPVLSRVHPSVPRSVSQRSLMEALGSGHYVGGSIRSMAAAALSGLAVRLSRPQGTRGSYGAFCKTLTRTLLTFFDLAWRLRKNFFYFYILASVILNVHLQVYI

SEQ ID NO: 12797 - DNA, 1410 bp, Homo sapiens
acttcccgctacgcctcggtgcagcccccggcgaagcccagcgcactcagcccctcccatgcacatttggacgctgtcctgcgctccagttgcacaaagctgagctcctgttacacactgacagaccactgacagccgccgctgccaacccccctcctcctcaccagacttccagacgactacatcatgctgcccacagacctgcgctgccactgccatcgccatccatcgcattccaccgacagactgctgcttctagtgatctgtactcacctcggaggtatctgggctggacacagcccctggacaatgatccagacagctggctgcccctcaagggacctgttaccttcagcgagacccatttcctccccaatcccagagactttttgtgctcctgccacatggctgccagggctcagttgtgcctggcagccaaatcgagtctctcattttctcttgtggaccagttagttttgcccagaatccatttctcttctgaatttgcagcattttctcaggtgctttttgatcaacaaaataacttgtatcttctgcttaactcctttatactacctggagaaaagtattttccatattttcaataaatgtcagacactattgagaaagaaatagagtctgaatgaatatggcacctttccctccctggtcctgtaaatgtggtccatatcttgttcagaagcgatatcccctgccattcagtgactgatgttgactcctgcattataaaacatctaagatagagtcctgtggtaacctgggggatagtgtccccactggtgatccttctgtcccagatgttgaatcctctaaaccagttaggattatcccaagcctcttagtaaatgaatcgttacctcattttggtcaacactatgtgagaagtcagccagcaggctcttggaaaatgtatcctcatttccagaaagtggtttgaaaacacaattcccaaattgttacaaaccataaatcccacacagattattggtgaacagctgtaaaattttactcaacccatgattcagggaaccaacagaattatataggtgcttttcaaaagcatttataaattcttgattatgtaggtagtggggggaaatgcagaaatgagatcattaatttagatacaaacctggttgatgaccagggggttttattttgcagaagaattgggtatttggtatcattttattcaattacatgtgatcctggtacatttcataagcttgggtaaaaaaattttttgttattttccatgcacaataagggaaatgttttaattggctttgtgcctcctgctttacaacagttctggcctcaagttaccaggtagcctgaactttgattttattttaccattaaattgctttaataccattgtatttggtg

SEQ ID NO: 12798 - protein, 95 aa, Homo sapiens
MLPTDLRCHCHRHPSHSTDRLLLLVICTHLGGIWAGHSPWTMIQTAGCPSRDLLPSARPISSPIPETFCAPATWLPGLSCAWQPNRVSHFLLWTS

SEQ ID NO: 12799 - DNA, 3086 bp, Homo sapiens
gaacactacctcaatcctacaaccacaaggaactgaattctgccaatagtctaactgaacgggaaagaaattatttcatagaatctccagaaaggaacatagcctcccaatactatgactttggtctagtatgacccatatggaacttctgacctacaaaacaataagatgataaatttgtgttgttttaaaccactaaatttgtggtaattcgttaagacagcaacaaaaagctaacgcaaagagaaaatccataggaccatattcaatagacacagaaaatgcatttgactgatttcatttcctattaagaaatagataaaattcatggagggtatcttgtaatttggaggaaagatatatcacatttagttgtactggtaggacacttttactgaatggcctgtatggatgtttcggaaatatgggtgctactctgctcatcaggacttacataacctagtcaacccaactgcgttgaaagtatctatggcaaacaagtgatcaaggtacacatcatcaataacaaaatatactacatcatgaacaccttgatatgataaactaacacacaaaatctttgctgtagtatacctggcaaaaataactgattctaatcatgagaaaacatcagaggaaagcaaatctagggacatttaaaaaaaattgttgaccaataattttcaaaagtgtcatagctgagggtttgcgaaggaacatggaaggacagagagcatgggacaaggaatagatataccaggctgactaatcagctttaaagaacttacaggctttgctctccaagcacatgggcttggacgtcaccaaaaaaatcctcactccccaaccgcctagaaagactttgccccacccctacggtgcgaccctgcctccttgaccagttaagccagccaccacatttcccaccacctgctccgctgggtgccccgggaccccctggcgcactaatgacctccaggccttctgggcagagcttgccaaagcgcctgggccctccccatggctccgcccacatcccggcttctcctcccgcgacatgcacttcccgctacgcctcggtgcagcccccggcgaagcccagcgcagctcagctaaactcagcggagccagcgcggcgcgatggaaggtcgagtgcagctgatgaaggccctcctggctcggcccctccggcccgcggcgcgtcgctggaggaacccgattccctttcccgagacgtttgatggcgataccgaccggctcccggagttcatcgtgcagacgagctcctacatgttcgtggacgagaacacgttctccaacgacgccctgaaggtgacgttcctcatcacccgcctcacggggcccgccctgcagtgggtgatcccctacatcaagaaggagagccccctcctcagtgattaccggggcttcctggctgagatgaagcgggtctttggatgggaggaggacgaggacttctaggccgggagaccctcgggcctggggaccggtgctctgggaagggtccgctgtgttactggccgccgccagggtcgccaccggcgccctccctccgcgcctccctccccctcgagccgccacgatgtcccctgcgctcctgtcccctcccgcgtagtgcttgcctttgttccaggaatagcgctccaggctcctgctgccgcccctgggcctcactctggagcgggctgcctccgccctctcgtgccagctcagcccctcccatgcacatttggacgctgtcctgcgctccagttgcacaaagctgagctcctgttacacactgacagaccactgacagccgccgctgccaacccccctcctcctcaccagacttccagacgactacatcatgctgcccacagacctgcgctgccactgccatcgccatccatcgcattccaccgacagactgctgcttctagtgatctgtactcacctcggaggtatctgggctggacacagcccctggacaatgatccagacagctggctgcccctcaagggacctgttaccttcagcgagacccatttcctccccaatcccagagactttttgtgctcctgccacatggctgccagggctcagttgtgcctggcagccaaatcgagtctctcattttctcttgtggaccagttagttttgcccagaatccatttctcttctgaatttgcagcattttctcaggtgctttttgatcaacaaaataacttgtatcttctgcttaactcctttatactacctggagaaaagtattttccatattttcaataaatgtcagacactattgagaaagaaatagagtctgaatgaatatggcacctttccctccctggtcctgtaaatgtggtccatatcttgttcagaagcgatatcccctgccattcagtgactgatgttgactcctgcattataaaacatctaagatagagtcctgtggtaacctgggggatagtgtccccactggtgatccttctgtcccagatgttgaatcctctaaaccagttaggattatcccaagcctcttagtaaatgaatcgttacctcattttggtcaacactatgtgagaagtcagccagcaggctcttggaaaatgtatcctcatttccagaaagtggtttgaaaacacaattcccaaattgttacaaaccataaatcccacacagattattggtgaacagctgtaaaattttactcaacccatgattcagggaaccaacagaattatataggtgcttttcaaaagcatttataaattcttgattatgtaggtagtggggggaaatgcagaaatgagatcattaatttagatacaaacctggttgatgaccagggggttttattttgcagaagaattgggtatttggtatcattttattcaattacatgtgatcctggtacatttcataagcttgggtaaaaaaattttttgttattttccatgcacaataagggaaatgttttaattggctttgtgcctcctgctttacaacagttctggcctcaagttaccaggtagcctgaactttgattttattttaccattaaattgctttaataccattgt

SEQ ID NO: 12800 - protein, 113 aa, Homo sapiens
MEGRVQLMKALLARPLRPAARRWRNPIPFPETFDGDTDRLPEFIVQTSSYMFVDENTFSNDALKVTFLITRLTGPALQWVIPYIKKESPLLSDYRGFLAEMKRVFGWEEDEDF

SEQ ID NO: 12801 - DNA, 1167 bp, Homo sapiens
ggacacgcatttccggcgacgcctcggtactgacctctgcagagccgggtggagcccattgacgtccagcgaagcgaggagcagcgatggacggtcgggtgcagctgataaaggccctcctggccttgccgatccggcctgcgacgcgtcgctggaggaacccgattccctttcccgagacgtttgacggcgataccgaccgactcccggagttcatcgtgcagacgggctcctacatgttcgtggacgagaacacgttctccagcgacgccctgaaggtgacgttcctcatcacccgcctcacagggcccgccctgcagtgggtgatcccctacatcaagaaggagagccccctcctcaatgattaccggggctttctggccgagatgaagcgagtctttggatgggaggaggacgaggacttctaggccgggagaccctcgggcctgggggcgggtgctctggggagggtccgctgtgttactggccgccgccagggtcgccaccggcgccctccctccgcgcctccctccccctcgagccgccgcgatgtcccctgcgctcctgttccctcccgcgtagtgcttgcctttgttccaggaatagcgctccaggctcctgctgccgcccctgggcctcactctggagcgagccgccgccctctccttccagccagccagcccctcccatgtacatttggacgctgtcctgcgctccagctgcaagctgggctcctgttacacactggacagaccacccactgccgccgctgccaagccctctcctccccaccagactgccagacgactacatcattctgcccacagacctgcgctgccacagccatcgccatccatcgcatcccaccgacagaagctggccgccccccaagggatctgtcaccttcagcgagacctatttcctccccacccccagaaacctcttgtgttcttgcctaggcccaggtgttcctggcagccaaatcgagtctctcattttctcttgtggaccagttagttttgcccataacgcagtattctgagtttgcaactgtctctctgatgtgtgccttttgttcaacacagtaacccctgcattctgctctgctctaatacactacctggagaaagtcttttccttattttcaataaatgtcagacattattg

SEQ ID NO: 12802 - protein, 212 aa, Homo sapiens
MGGGRGLLGRETLGPGGGCSGEGPLCYWPPPGSPPAPSLRASLPLEPPRCPLRSCSLPRSACLCSRNSAPGSCCRPWASLWSEPPPSPSSQPAPPMYIWTLSCAPAASWAPVTHWTDHPLPPLPSPLLPTRLPDDYIILPTDLRCHSHRHPSHPTDRSWPPPKGSVTFSETYFLPTPRNLLCSCLGPGVPGSQIESLIFSCGPVSFAHNAVF

SEQ ID NO: 12803 - DNA, 1287 bp, Homo sapiens
ggacacgcatttccggcgacgcctcggtactgacctctgcagagccgggtggagcccattgacgtccagcgaagcgaggagcagcgatggacggtcgggtgcagctgataaaggccctcctggccttgccgatccggcctgcgacgcgtcgctggaggaacccgattccctttcccgagacgtttgacggcgataccgaccgactcccggagttcatcgtgcagacgggctcctacatgttcgtggacgagaacacgttctccagcgacgccctgaaggtgacgttcctcatcacccgcctcacagggcccgccctgcagtgggtgatcccctacatcaagaaggagagccccctcctcaatgattaccggggctttctggccgagatgaagcgagtctttggatgggaggaggacgaggacttctaggccgggagaccctcgggcctgggggcgggtgctctggggagggtccgctgtgttactggccgccgccagggtcgccaccggcgccctccctccgcgcctccctccccctcgagccgccgcgatgtcccctgcgctcctgttccctcccgcgtagtgcttgcctttgttccaggaatagcgctccaggctcctgctgccgcccctgggcctcactctggagcgagccgccgccctctccttccagccagccagcccctcccatgtacatttggacgctgtcctgcgctccagctgcaagctgggctcctgttacacactggacagaccacccactgccgccgctgccaagccctctcctccccaccagactgccagacgactacatcattctgcccacagacctgcgctgccacagccatcgccatccatcgcatcccaccgacagaagctggccgccccccaagggatctgtcaccttcagcgagacctatttcctccccacccccagaaacctcttgtgttcttgcctaggcccaggtgttcctggcagccaaatcgagtctctcattttctcttgtggaccagttagttttgcccataacgcagtattctgagtttgcaactgtctctctgatgtgtgccttttgttcaacacagtaacccctgcattctgctctgctctaatacactacctggagaaagtcttttccttattttcaataaatgtcagacattattgaaaagaaatggtctcaatgaatatggcacttttccctccctggttctgtaaatggggtccatatcttgttcaaaagctatatgccctgccatgctatgactgatgttgacacagagtcct

SEQ ID NO: 12804 - protein, 212 aa, Homo sapiens; identical to SEQ ID NO: 12802

SEQ ID NO: 12805 - DNA, 804 bp, Homo sapiens
cacgcatttccggcgacgcctcggtactgacctctgcagagccgggtggagcccattgacgtccagcgaagcgaggagcagcgatggacggtcgggtgcagctgataaaggccctcctggccttgccgatccggcctgcgacgcgtcgctggaggaacccgattccctttcccgagacgtttgacggcgataccgaccgactcccggagttcatcgtgcagacgggctcctacatgttcgtggacgagaacacgttctccagcgacgccctgaaggtgacgttcctcatcacccgcctcacagggcccgccctgcagtgggtgatcccctacatcaagaaggagagccccctcctcaatgattaccggggctttctggccgagatgaagcgagtctttggatgggaggaggacgaggacttctaggccgggagaccctcgggcctgggggcgggtgctctggggagggtccgctgtgttactggccgccgccagggtcgccaccggcgccctccctccgcgcctccctccccctcgagccgccgcgatgtcccctgcgctcctgttccctcccgcgtagtgcttgcctttgttccaggaatagtgttcctggcagccaaatcgagtctctcattttctcttgtggaccagttagttttgcccataacgcagtattctgagtttgcaactgtctctctgatgtgtgccttttgttcaacacagtaacccctgcattctgctctgctctaatacactacctggagaaagtcttttccttattttcaataaatgtcagacattattg

SEQ ID NO: 12806 - protein, 92 aa, Homo sapiens
MGGGRGLLGRETLGPGGGCSGEGPLCYWPPPGSPPAPSLRASLPLEPPRCPLRSCSLPRSACLCSRNSVPGSQIESLIFSCGPVSFAHNAVF

SEQ ID NO: 12807 - DNA, 970 bp, Homo sapiens
cacgcatttccggcgacgcctcggtactgacctctgcagagccgggtggagcccattgacgtccagcgaagcgaggagcagcgatggacggtcgggtgcagctgataaaggccctcctggccttgccgatccggcctgcgacgcgtcgctggaggaacccgattccctttcccgagacgtttgacggcgataccgaccgactcccggagttcatcgtgcagacgggctcctacatgttcgtggacgagaacacgttctccagcgacgccctgaaggtgacgttcctcatcacccgcctcacagggcccgccctgcagtgggtgatcccctacatcaagaaggagagccccctcctcaatgattaccggggctttctggccgagatgaagcgagtctttggatgggaggaggacgaggacttctaggccgggagaccctcgggcctgggggcgggtgctctggggagggtccgctgtgttactggccgccgccagggtcgccaccggcgccctccctccgcgcctccctccccctcgagccgccgcgatgtcccctgcgctgccacagccatcgccatccatcgcatcccaccgacagactgctgctcctagtgatctggactcacctcggaggtatctgggctggccacagtccctggacagtgatccagacagctggccgccccccaagggatctgtcaccttcagcgagacctatttcctccccacccccagaaacctcttgtgttcttgcctaggcccaggtgttcctggcagccaaatcgagtctctcattttctcttgtggaccagttagttttgcccataacgcagtattctgagtttgcaactgtctctctgatgtgtgccttttgttcaacacagtaacccctgcattctgctctgctctaatacactacctggagaaagtcttttccttattttcaataaatgtcagacattattgaaaag

SEQ ID NO: 12808 - protein, 118 aa, Homo sapiens
MGGGRGLLGRETLGPGGGCSGEGPLCYWPPPGSPPAPSLRASLPLEPPRCPLRCHSHRHPSHPTDRLLLLVIWTHLGGIWAGHSPWTVIQTAGRPPRDLSPSARPISSPPPETSCVLA

SEQ ID NO: 12809 - DNA, 886 bp, Homo sapiens
gagccgggtggagcccattgacgtccagcgaagcgaggagcagcgatggacggtcgggtgcagctgataaaggccctcctggccttgccgatccggcctgcgacgcgtcgctggaggaacccgattccctttcccgagacgtttgacggcgccctccctccgcgcctccctccccctcgagccgccgcgatgtcccctgcgctcctgttccctcccgcgtagtgcttgcctttgttccaggaatagcgctccaggctcctgctgccgcccctgggcctcactctggagcgagccgccgccctctccttccagccagccagcccctcccatgtacatttggacgctgtcctgcgctccagctgcaagctgggctcctgttacacactggacagaccacccactgccgccgctgccaagccctctcctccccaccagactgccagacgactacatcattctgcccacagacctgcgctgccacagccatcgccatccatcgcatcccaccgacagactgctgctcctagtgatctggactcacctcggaggtatctgggctggccacagtccctggacagtgatccagacagctggccgccccccaagggatctgtcaccttcagcgagacctatttcctccccacccccagaaacctcttgtgttcttgcctaggcccaggtgttcctggcagccaaatcgagtctctcattttctcttgtggaccagttagttttgcccataacgcagtattctgagtttgcaactgtctctctgatgtgtgccttttgttcaacacagtaacccctgcattctgctctgctctaatacactacctggagaaagtcttttccttattttcaataaatgtcagacattattgaaaag

SEQ ID NO: 12810 - protein, 58 aa, Homo sapiens
MDGRVQLIKALLALPIRPATRRWRNPIPFPETFDGALPPRLPPPRAAAMSPALLFPPA

SEQ ID NO: 12811 - DNA, 1001 bp, Homo sapiens
gagccgggtggagcccattgacgtccagcgaagcgaggagcagcgatggacggtcgggtgcagctgataaaggccctcctggccttgccgatccggcctgcgacgcgtcgctggaggaacccgattccctttcccgagacgtttgacggcgccctccctccgcgcctccctccccctcgagccgccgcgatgtcccctgcgctcctgttccctcccgcgtagtgcttgcctttgttccaggaatagcgctccaggctcctgctgccgcccctgggcctcactctggagcgagccgccgccctctccttccagccagccagcccctcccatgtacatttggacgctgtcctgcgctccagctgcaagctgggctcctgttacacactggacagaccacccactgccgccgctgccaagccctctcctccccaccagactgccagacgactacatcattctgcccacagacctgcgctgccacagccatcgccatccatcgcatcccaccgacagactgctgctcctagtgatctggactcacctcggaggtatctgggctggccacagtccctggacagtgatccagacagctggccgccccccaagggatctgtcaccttcagcgagacctatttcctccccacccccagaaacctcttgtgttcttgcctaggcccaggtgttcctggcagccaaatcgagtctctcattttctcttgtggaccagttagttttgcccataacgcagtattctgagtttgcaactgtctctctgatgtgtgccttttgttcaacacagtaacccctgcattctgctctgctctaatacactacctggagaaagtcttttccttattttcaataaatgtcagacattattgaaaagaaatggtctcaatgaatatggcacttttccctccctggttctgtaaatggggtccatatcttgttcaaaagctatatgccctgccatgctatgactgatgttgacacagagtcct

SEQ ID NO: 12812 - protein, 58 aa, Homo sapiens; identical to SEQ ID NO: 12810

SEQ ID NO: 12813 - DNA, 1079 bp, Homo sapiens
attgacgtccagcgaagcgaggagcagcgatggacggtcgggtgcagctgataaaggccctcctggccttgccgatccggcctgcgacgcgtcgctggaggaacccgattccctttcccgagacgtttgacggcgataccgaccgactcccggagttcatcgtgcagacgggctcctacatgttcgtggacgagaacacgttctccagcgacgccctgaaggtgacgttcctcatcacccgcctcacagggcccgccctgcagtgggtgatcccctacatcaagaaggagagccccctcctcaatgattaccggggctttctggccgagatgaagcgagtctttggatgggaggaggacgaggacttctaggccgggagaccctcgggcctgggggcgggtgctctggggagggtccgctgtgttactggccgccgccagggtcgccaccggcgccctccctccgcgcctccctccccctcgagccgccgcgatgtcccctgcgctcctgttccctcccgcgtagtgatttggacgctgtcctgcgctccagctgcaagctgggctcctgttacacactggacagaccacccactgccgccgctgccaagccctctcctccccaccagactgccagacgactacatcattctgcccacagacctgcgctgccacagccatcgccatccatcgcatcccaccgacagactgctgctcctagtgatctggactcacctcggaggtatctgggctggccacagtccctggacagtgatccagacagctggccgccccccaagggatctgtcaccttcagcgagacctatttcctccccacccccagaaacctcttgtgttcttgcctaggcccaggtgttcctggcagccaaatcgagtctctcattttctcttgtggaccagttagttttgcccataacgcagtattctgagtttgcaactgtctctctgatgtgtgccttttgttcaacacagtaacccctgcattctgctctgctctaatacactacctggagaaagtcttttccttattttcaataaatgtcagacattattgaaaag

SEQ ID NO: 12814 - protein, 200 aa, Homo sapiens
MGGGRGLLGRETLGPGGGCSGEGPLCYWPPPGSPPAPSLRASLPLEPPRCPLRSCSLPRSDLDAVLRSSCKLGSCYTLDRPPTAAAAKPSPPHQTARRLHHSAHRPALPQPSPSIASHRQTAAPSDLDSPRRYLGWPQSLDSDPDSWPPPKGSVTFSETYFLPTPRNLLCSCLGPGVPGSQIESLIFSCGPVSFAHNAVF

SEQ ID NO: 12815 - DNA, 1194 bp, Homo sapiens
attgacgtccagcgaagcgaggagcagcgatggacggtcgggtgcagctgataaaggccctcctggccttgccgatccggcctgcgacgcgtcgctggaggaacccgattccctttcccgagacgtttgacggcgataccgaccgactcccggagttcatcgtgcagacgggctcctacatgttcgtggacgagaacacgttctccagcgacgccctgaaggtgacgttcctcatcacccgcctcacagggcccgccctgcagtgggtgatcccctacatcaagaaggagagccccctcctcaatgattaccggggctttctggccgagatgaagcgagtctttggatgggaggaggacgaggacttctaggccgggagaccctcgggcctgggggcgggtgctctggggagggtccgctgtgttactggccgccgccagggtcgccaccggcgccctccctccgcgcctccctccccctcgagccgccgcgatgtcccctgcgctcctgttccctcccgcgtagtgatttggacgctgtcctgcgctccagctgcaagctgggctcctgttacacactggacagaccacccactgccgccgctgccaagccctctcctccccaccagactgccagacgactacatcattctgcccacagacctgcgctgccacagccatcgccatccatcgcatcccaccgacagactgctgctcctagtgatctggactcacctcggaggtatctgggctggccacagtccctggacagtgatccagacagctggccgccccccaagggatctgtcaccttcagcgagacctatttcctccccacccccagaaacctcttgtgttcttgcctaggcccaggtgttcctggcagccaaatcgagtctctcattttctcttgtggaccagttagttttgcccataacgcagtattctgagtttgcaactgtctctctgatgtgtgccttttgttcaacacagtaacccctgcattctgctctgctctaatacactacctggagaaagtcttttccttattttcaataaatgtcagacattattgaaaagaaatggtctcaatgaatatggcacttttccctccctggttctgtaaatggggtccatatcttgttcaaaagctatatgccctgccatgctatgactgatgttgacacagagtcct

SEQ ID NO: 12816 - protein, 200 aa, Homo sapiens; identical to SEQ ID NO: 12814

SEQ ID NO: 12817 - DNA, 1177 bp, Homo sapiens
tccagcgaagcgaggagcagcgatggacggtcgggtgcagctgataaaggccctcctggccttgccgatccggcctgcgacgcgtcgctggaggaacccgattccctttcccgagacgtttgacggcgataccgaccgactcccggagttcatcgtgcagacgggctcctacatgttcgtggacgagaacacgttctccagcgacgccctgaaggtgacgttcctcatcacccgcctcacagggcccgccctgcagtgggtgatcccctacatcaagaaggagagccccctcctcaatgattaccggggctttctggccgagatgaagcgagtctttggatgggaggaggacgaggacttctaggccgggagaccctcgggcctgggggcgggtgctctggggagggtccgctgtgttactggccgccgccagggtcgccaccggcgccctccctccgcgcctccctccccctcgagccgccgcgatgtcccctgcgctcctgttccctcccgcgtagtgcttgcctttgttccaggaatagcgctccaggctcctgctgccgcccctgggcctcactctggagcgagccgccgccctctccttccagccagccagcccctcccatgtacatttggacgctgtcctgcgctccagctgcaagctgggctcctgttacacactggacagaccacccactgccgccgctgccaagccctctcctccccaccagactgccagacgactacatcattctgcccacagacctgcgctgccacagccatcgccatccatcgcatcccaccgacagactgctgctcctagtgatctggactcacctcggaggtatctgggctggccacagtccctggacagtgatccagacagctggccgccccccaagggatctgtcaccttcagcgagacctatttcctccccacccccagaaacctcttgtgttcttgcctaggcccaggtgttcctggcagccaaatcgagtctctcattttctcttgtggaccagttagttttgcccataacgcagtattctgagtttgcaactgtctctctgatgtgtgccttttgttcaacacagtaacccctgcattctgctctgctctaatacactacctggagaaagtcttttccttattttcaataaatgtcagacattattg

SEQ ID NO: 12818 - protein, 209 aa, Homo sapiens
MGGGRGLLGRETLGPGGGCSGEGPLCYWPPPGSPPAPSLRASLPLEPPRCPLRSCSLPRSACLCSRNSAPGSCCRPWASLWSEPPPSPSSQPAPPMYIWTLSCAPAASWAPVTHWTDHPLPPLPSPLLPTRLPDDYIILPTDLRCHSHRHPSHPTDRLLLLVIWTHLGGIWAGHSPWTVIQTAGRPPRDLSPSARPISSPPPETSCVLA

SEQ ID NO: 12819 - DNA, 881 bp, Homo sapiens
agcagcgatggacggtcgggtgcagctgataaaggccctccgcgcctccctccccctcgagccgccgcgatgtcccctgcgctcctgttccctcccgcgtagtgcttgcctttgttccaggaatagcgctccaggctcctgctgccgcccctgggcctcactctggagcgagccgccgccctctccttccagccagccagcccctcccatgtacatttggacgctgtcctgcgctccagctgcaagctgggctcctgttacacactggacagaccacccactgccgccgctgccaagccctctcctccccaccagactgccagacgactacatcattctgcccacagacctgcgctgccacagccatcgccatccatcgcatcccaccgacagactgctgctcctagtgatctggactcacctcggaggtatctgggctggccacagtccctggacagtgatccagacagctggccgccccccaagggatctgtcaccttcagcgagacctatttcctccccacccccagaaacctcttgtgttcttgcctaggcccaggtgttcctggcagccaaatcgagtctctcattttctcttgtggaccagttagttttgcccataacgcagtattctgagtttgcaactgtctctctgatgtgtgccttttgttcaacacagtaacccctgcattctgctctgctctaatacactacctggagaaagtcttttccttattttcaataaatgtcagacattattgaaaagaaatggtctcaatgaatatggcacttttccctccctggttctgtaaatggggtccatatcttgttcaaaagctatatgccctgccatgctatgactgatgttgacacagagtcct

SEQ ID NO: 12820 - protein, 181 aa, Homo sapiens
MDGRVQLIKALRASLPLEPPRCPLRSCSLPRSACLCSRNSAPGSCCRPWASLWSEPPPSPSSQPAPPMYIWTLSCAPAASWAPVTHWTDHPLPPLPSPLLPTRLPDDYIILPTDLRCHSHRHPSHPTDRLLLLVIWTHLGGIWAGHSPWTVIQTAGRPPRDLSPSARPISSPPPETSCVLA

SEQ ID NO: 12821 - DNA, 830 bp, Homo sapiens
gacccccacgcaacccagcgaaactccgcggagcgcgcgcggcacgatggacggtcgggtgcagctgatgaaggccctcctggccgggcccctccggcccgcggcgcgtcgctggaggaacccgattccctttcccgagacgtttgacggagataccgaccgactcccggagttcatcgtgcagacgagctcctacatgttcgtggacgagaacacgttctccaacgacgccctgaagcccagcccctccatgcacatttggacgctgtcctgcacttcaggtgcaagctgggctcctgttacatactggacagaccacccacagccgctgctgccaacccacctccactcctccagactgccagccaactacatcattctgcccacagacctacgctaccactgccatcgccatccaccgcatctcaccaacagactgtggctcctagtgatgtggactcacctcggaggtatccgagctggacacagcccctggacagtgatccagacagctggccgtcccccaaggagcctgtcaccttcagcgagacccatttcctccccatccccagagacctcttgtgttcctgccacatagctgccagggcttaagtgtgcctggcaaccaaatcgaatctctcattttctcctgtggaccagttagttttgcctagaatcctgttttcttctgaatttgcagctgtctctctgatgggtgccttttgttcaacacagtaagccctgctcccttccctgctctaatacactacctgtacaaaggttttttccttatttttaataaatgtcagacactattaaatagaaatgga

SEQ ID NO: 12822 - protein, 183 aa, Homo sapiens
MDGRVQLMKALLAGPLRPAARRWRNPIPFPETFDGDTDRLPEFIVQTSSYMFVDENTFSNDALKPSPSMHIWTLSCTSGASWAPVTYWTDHPQPLLPTHLHSSRLPANYIILPTDLRYHCHRHPPHLTNRLWLLVMWTHLGGIRAGHSPWTVIQTAGRPPRSLSPSARPISSPSPETSCVPAT

SEQ ID NO: 12823 - DNA, 702 bp, Homo sapiens
gcttccggcgacgccttagcgctgacccccacgcaacccagcgaaactccgcggagcgcgcgcggcacgatggacggtcgggtgcagctgatgaaggccctcctggccgggcccctccggcccgcggcgcgtcgctggaggaacccgattccctttcccgagacgtttgacggagataccgaccgactcccggagttcatcgtgcagacgagctcctacatgttcgtggacgagaacacgttctccaacgacgccctgaagacctacgctaccactgccatcgccatccaccgcatctcaccaacagactgtggctcctagtgatgtggactcacctcggaggtatccgagctggacacagcccctggacagtgatccagacagctggccgtcccccaaggagcctgtcaccttcagcgagacccatttcctccccatccccagagacctcttgtgttcctgccacatagctgccagggcttaagtgtgcctggcaaccaaatcgaatctctcattttctcctgtggaccagttagttttgcctagaatcctgttttcttctgaatttgcagctgtctctctgatgggtgccttttgttcaacacagtaagccctgctcccttccctgctctaatacactacctgtacaaaggttttttccttatttttaataaatgtcagacactattaaatagaaatgga

SEQ ID NO: 12824 - protein, 83 aa, Homo sapiens
MDGRVQLMKALLAGPLRPAARRWRNPIPFPETFDGDTDRLPEFIVQTSSYMFVDENTFSNDALKTYATTAIAIHRISPTDCGS

SEQ ID NO: 12825 - DNA, 626 bp, Homo sapiens
gcttccggcgacgccttagcgctgacccccacgcaacccagcgaaactccgcggagcgcgcgcggcacgatggacggtcgggtgcagctgatgaaggccctcctggccgggcccctccggcccgcggcgcgtcgctggaggaacccgattccctttcccgagacgtttgacggagataccgaccgactcccggagttcatcgtgcagacgagctcctacatgttcgtggacgagaacacgttctccaacgacgccctgaagacctacgctaccactgccatcgccatccaccgcatctcaccaacagactgtggctcctagtgatgtggactcaccttcagcgagacccatttcctccccatccccagagacctcttgtgttcctgccacatagctgccagggcttaagtgtgcctggcaaccaaatcgaatctctcattttctcctgtggaccagttagttttgcctagaatcctgttttcttctgaatttgcagctgtctctctgatgggtgccttttgttcaacacagtaagccctgctcccttccctgctctaatacactacctgtacaaaggttttttccttatttttaataaatgtcagacactattaaatagaaatgga

SEQ ID NO: 12826 - protein, 83 aa, Homo sapiens; identical to SEQ ID NO: 12824

SEQ ID NO: 12827 - DNA, 829 bp, Homo sapiens
gcccccaccctcgacatgcgcttccggcgacgccttagcgctgacccccacgcaacccagcgaaactccgcggagcgcgcgcggcacgatggacggtcgggtgcagctgatgaaggccctcctggccgggcccctccggcccgcggcgcgtcgctggaggaacccgattccctttcccgagacgtttgacggagataccgaccgactcccggagttcatcgtgcagacgagctcctacatgttcgtggacgagaacacgttctccaacgacgccctgaaggtgcaagctgggctcctgttacatactggacagaccacccacagccgctgctgccaacccacctccactcctccagactgccagccaactacatcattctgcccacagacctacgctaccactgccatcgccatccaccgcatctcaccaacagactgtggctcctagtgatgtggactcacctcggaggtatccgagctggacacagcccctggacagtgatccagacagctggccgtcccccaaggagcctgtcaccttcagcgagacccatttcctccccatccccagagacctcttgtgttcctgccacatagctgccagggcttaagtgtgcctggcaaccaaatcgaatctctcattttctcctgtggaccagttagttttgcctagaatcctgttttcttctgaatttgcagctgtctctctgatgggtgccttttgttcaacacagtaagccctgctcccttccctgctctaatacactacctgtacaaaggttttttccttatttttaataaatgtcagacactattaaatagaaatgga

SEQ ID NO: 12828 - protein, 119 aa, Homo sapiens
MDGRVQLMKALLAGPLRPAARRWRNPIPFPETFDGDTDRLPEFIVQTSSYMFVDENTFSNDALKVQAGLLLHTGQTTHSRCCQPTSTPPDCQPTTSFCPQTYATTAIAIHRISPTDCGS

SEQ ID NO: 12829 - DNA, 1236 bp, Homo sapiens
ggctctcccccatggctccgcccacagcccgtcccggcccgggcccccaccctcgacatgcgcttccggcgacgccttagcgctgacccccacgcaacccagcgaaactccgcggagcgcgcgcggcacgatggacggtcgggtgcagctgatgaaggccctcctggccgggcccctccggcccgcggcgcgtcgctggaggaacccgattccctttcccgagacgtttgacggagataccgaccgactcccggagttcatcgtgcagacgagctcctacatgttcgtggacgagaacacgttctccaacgacgccctgaaggtgacgttcctcatcacccgcctcacggggccagccctgcagtgggtgatcccctacatcaggaaggagagccccctgctcaatgattaccggggcttcctggccgagatgaagcgggtctttggatgggaggaggacgaggacttctaggccgggagacccttgggcctgggggcgggtgctctgggaagagttcgctgtgccagtggccaccgctagggtctccacaggcgccctccctccgcgcctccctccccctcgagccgccgcgatgtcccctgcgctcctgtcccctcccgcgtagtgcttgcctttgttccaggaatagcgctccaggctcctgctgcagctcctgggccgcactctagagcgcgctgcctccgccctcttttgccagcccagcccctccatgcacatttggacgctgtcctgcacttcaggtgcaagctgggctcctgttacatactggacagaccacccacagccgtgccatcgccatccaccgcatctcaccaacagactgtggctcctagtgatgtggactcacctcggaggtatccgagctggacacagcccctggacagtgatccagacagctggccgtcccccaaggagcctgtcaccttcagcgagacccatttcctccccatccccagagacctcttgtgttcctgccacatagctgccagggcttaagtgtgcctggcaaccaaatcgaatctctcattttctcctgtggaccagttagttttgcctagaatcctgttttcttctgaatttgcagctgtctctctgatgggtgccttttgttcaacacagtaagccctgctcccttccctgctctaatacactacctgtacaaaggttttttccttatttttaataaatgtcagacactattaaatagaaatgga

SEQ ID NO: 12830 - protein, 90 aa, Homo sapiens
MHIWTLSCTSGASWAPVTYWTDHPQPCHRHPPHLTNRLWLLVMWTHLGGIRAGHSPWTVIQTAGRPPRSLSPSARPISSPSPETSCVPAT

SEQ ID NO: 12831 - DNA, 1329 bp, Homo sapiens
gcggagctcgcgcaagcgcctgggctctcccccatggctccgcccacagcccgtcccggcccgggcccccaccctcgacatgcgcttccggcgacgccttagcgctgacccccacgcaacccagcgaaactccgcggagcgcgcgcggcacgatggacggtcgggtgcagctgatgaaggccctcctggccgggcccctccggcccgcggcgcgtcgctggaggaacccgattccctttcccgagacgtttgacggagataccgaccgactcccggagttcatcgtgcagacgagctcctacatgttcgtggacgagaacacgttctccaacgacgccctgaaggtgacgttcctcatcacccgcctcacggggccagccctgcagtgggtgatcccctacatcaggaaggagagccccctgctcaatgattaccggggcttcctggccgagatgaagcgggtctttggatgggaggaggacgaggacttctaggccgggagacccttgggcctgggggcgggtgctctgggaagagttcgctgtgccagtggccaccgctagggtctccacaggcgccctccctccgcgcctccctccccctcgagccgccgcgatgtcccctgcgctcctgtcccctcccgcgtagtgcttgcctttgttccaggaatagcgctccaggctcctgctgcagctcctgggccgcactctagagcgcgctgcctccgccctcttttgccagcccagcccctccatgcacatttggacgctgtcctgcacttcaggtgcaagctgggctcctgttacatactggacagaccacccacagccgctgctgccaacccacctccactcctccagactgccagccaactacatcattctgcccacagacctacgctaccactgccatcgccatccaccgcatctcaccaacagactgtggctcctagtgatgtggactcacctcggaggtatccgagctggacacagcccctggacagtgatccagacagctggccgtcccccaaggagcctgtcaccttcagcgagacccatttcctccccatccccagagacctcttgtgttcctgccacatagctgccagggcttaagtgtgcctggcaaccaaatcgaatctctcattttctcctgtggaccagttagttttgcctagaatcctgttttcttctgaatttgcagctgtctctctgatgggtgccttttgttcaacacagtaagccctgctcccttccctgctctaatacactacctgtacaaaggttttttccttatttttaataaatgtcagacactattaaatagaaa

SEQ ID NO: 12832 - protein, 115 aa, Homo sapiens
MHIWTLSCTSGASWAPVTYWTDHPQPLLPTHLHSSRLPANYIILPTDLRYHCHRHPPHLTNRLWLLVMWTHLGGIRAGHSPWTVIQTAGRPPRSLSPSARPISSPSPETSCVPAT

SEQ ID NO: 12833 - DNA, 3173 bp, Homo sapiens
atgattggacttgacatccaagacagatctctccctttgccggccagcaatgctggctgtcgtctgggagctcagctagcatggttgactgctagccagaagcgaaaagtcgtcgactcccggactgagattccactgctcggtgcgagcagttgccaacaggggagtccccaaagtgtaggtggcgaccagcacgggcctgggaaagcaggcgctaggagtagaggagttacaggggccggggtggggggagcgccggccttccatctccttggccaacggtgggagcccgctacagtggcacccgcgggccctccctgccccggaggggccagggtacgcccagcagacacgctcgcccgcactacgcggggctcgccggggttttgccaaccggcggctgacgtcggcgcgcccctgccgagctctccttttactacagcgggcaggcggctttgtgaggccccgccttcgccagcccccaccctccgcgtgcccacaccttgccgtttatatagaatgcgccgcggtgttgattcgtggctctctaggaccggagagttctttggaaggagagcgcgagcgagggagcggccttcctcggggttttattttgatcgagttggcggcccgcagcggattgggagaggcgggggaaagcagcctgccagtgcgcgggcagcccacccaggcaactcccagcgagcggcccgcgcggagcccagggaggccggcagtgaagccggggagtcccggccgctcctctcggccgccccgggggttgcgagcgtggctctccgcaggcgggcagaagctgagggcgcggggcgcggaggaagcgccgcgccgctttgcagcggcggcggcggcagcggtggggaaaagcggattccgccccgaaccacaccgaggggagctcgtggtcgagacttgccgccctaagcactctcccaagtccgacccgctcggcgaggacttccgtcttctgagcgaaccttgtcaagcaagctgggatctatgagtggaaaggtgaccaagcccaaagaggagaaagatgcttctaagggagtttctctgcacaagctctctgtttgcctgctgtcgtccacataagatgtgacttgctcctgcttgccttcctccatgattgtgaggcctccccagccacgtggaactttctggatgacgccccccctggcacacaggaatacattatgttacgacaagattccatccaatctgcggaattaaagaaaaaagagtccccctttcgtgctaagtgtcacgaaatcttctgctgcccgctgaagcaagtacaccacaaagagaacacagagccggaagagcctcagcttaagggtatagttaccaagctatacagccgacaaggctaccacttgcagctgcaggcggatggaaccattgatggcaccaaagatgaggacagcacttacactctgtttaacctcatccctgtgggtctgcgagtggtggctatccaaggagttcaaaccaagctgtacttggcaatgaacagtgagggatacttgtacacctcggaacttttcacacctgagtgcaaattcaaagaatcagtgtttgaaaattattatgtgacatattcatcaatgatataccgtcagcagcagtcaggccgagggtggtatctgggtctgaacaaagaaggagagatcatgaaaggcaaccatgtgaagaagaacaagcctgcagctcattttctgcctaaaccactgaaagtggccatgtacaaggagccatcactgcacgatctcacggagttctcccgatctggaagcgggaccccaaccaagagcagaagtgtctctggcgtgctgaacggaggcaaatccatgagccacaatgaatcaacgtagccagtgagggcaaaagaagggctctgtaacagaaccttacctccaggtgctgttgaattcttctagcagtccttcacccaaaagttcaaatttgtcagtgacatttaccaaacaaacaggcagagttcactattctatctgccattagaccttcttatcatccatactaaagccccattatttagattgagcttgtgcataagaatgccaagcattttagtgaactaaatctgagagaaggactgccaaattttctcatgatctcacctatactttggggatgataatccaaaagtatttcacagcactaatgctgatcaaaatttgctctcccaccaagaaaatgtaaaagaccacaattgttcttcaaaaacaaacaaaacaaaacaaaacaaaattaactgcttaaatgttttgtcggggcaaacaaaattatgtgaattgtgttgttttcttggcttgatgttttctatctacgcttgattcacatgtactcttttctttggcatagtgcaactttatgatttctgaaattcaatggttctattgactttttgcgtcacttaatccaaatcaaccaaattcagggttgaatctgaattggcttctcaggctcaaggtaacagtgttcttgtggtttgaccaattgtttttctttctttttttttttttttagatttgtggtattctggtcaagttattgtgctgtactttgtgcgtagaaattgagttgtattgtcaaccccagtcagtaaagagaacttcaaaaaattatcctcaagtgtagatttctcttaattccatttgtgtatcatgttaaactattgttgtggcttcttgtgtaaagacaggaactgtggaactgtgatgttgtcttttgtgttgttaaaataagaaatgtcttatctgtatatgtatgagtcttcctgtcattgtatttggcacatgaatattgtgtacaaggaattgttaagactggttttccctcaacaacatatattatacttgctactggaaaagtgtttaagacttagctaggtttccatttagatcttcatatctgttgcatggaagaaagttgggttcttggcatagagttgcatgatatgtaagattttgtgcattcataattgttaaaaatctgtgttccaaaagtggacatagcatgtacaggcagttttctgtcctgtgcacaaaaagtttaaaaaagttgtttaatatttgttgttgtatacccaaatacgcaccgaataaactctttatattcattcaaagaat

SEQ ID NO: 12834 - protein, 313 aa, Homo sapiens
MIGLDIQDRSLPLPASNAGCRLGAQLAWLTASQKRKVVDSRTEIPLLGASSCQQGSPQSVGGDQHGPGKAGARSRGVTGAGVGGAPAFHLLGQRWEPATVAPAGPPCPGGARVRPADTLARTTRGSPGFCQPAADVGAPLPSSPFTTAGRRLCEAPPSPAPTLRVPTPCRLYRMRRGVDSWLSRTGEFFGRRARARERPSSGFYFDRVGGPQRIGRGGGKQPASARAAHPGNSQRAARAEPREAGSEAGESRPLLSAAPGVASVALRRRAEAEGAGRGGSAAPLCSGGGGSGGEKRIPPRTTPRGARGRDLPP

SEQ ID NO: 12835 - DNA, 3063 bp, Homo sapiens
atgattggacttgacatccaagacagatctctccctttgccggccagcaatgctggctgtcgtctgggagctcagctagcatggttgactgctagccagaagcgaaaagtcgtcgactcccggactgagattccactgctcggtgcgagcagttgccaacaggggagtccccaaagtgtaggtggcgaccagcacgggcctgggaaagcaggcgctaggagtagaggagttacaggggccggggtggggggagcgccggccttccatctccttggccaacggtgggagcccgctacagtggcacccgcgggccctccctgccccggaggggccagggtacgcccagcagacacgctcgcccgcactacgcggggctcgccggggttttgccaaccggcggctgacgtcggcgcgcccctgccgagctctccttttactacagcgggcaggcggctttgtgaggccccgccttcgccagcccccaccctccgcgtgcccacaccttgccgtttatatagaatgcgccgcggtgttgattcgtggctctctaggaccggagagttctttggaaggagagcgcgagcgagggagcggccttcctcggggttttattttgatcgagttggcggcccgcagcggattgggagaggcgggggaaagcagcctgccagtgcgcgggcagcccacccaggcaactcccagcgagcggcccgcgcggagcccagggaggccggcagtgaagccggggagtcccggccgctcctctcggccgccccgggggttgcgagcgtggctctccgcaggcgggcagaagctgagggcgcggggcgcggaggaagcgccgcgccgctttgcagcggcggcggcggcagcggtggggaaaagcggattccgccccgaaccacaccgaggggagctcgtggtcgagacttgccgccctaagcactctcccaagtccgacccgctcggcgaggacttccgtcttctgagcgaaccttgtcaagcaagctgggatctatgagtggaaaggtgaccaagcccaaagaggagaaagatgcttctaaggttctggatgacgccccccctggcacacaggaatacattatgttacgacaagattccatccaatctgcggaattaaagaaaaaagagtccccctttcgtgctaagtgtcacgaaatcttctgctgcccgctgaagcaagtacaccacaaagagaacacagagccggaagagcctcagcttaagggtatagttaccaagctatacagccgacaaggctaccacttgcagctgcaggcggatggaaccattgatggcaccaaagatgaggacagcacttacactctgtttaacctcatccctgtgggtctgcgagtggtggctatccaaggagttcaaaccaagctgtacttggcaatgaacagtgagggatacttgtacacctcggaacttttcacacctgagtgcaaattcaaagaatcagtgtttgaaaattattatgtgacatattcatcaatgatataccgtcagcagcagtcaggccgagggtggtatctgggtctgaacaaagaaggagagatcatgaaaggcaaccatgtgaagaagaacaagcctgcagctcattttctgcctaaaccactgaaagtggccatgtacaaggagccatcactgcacgatctcacggagttctcccgatctggaagcgggaccccaaccaagagcagaagtgtctctggcgtgctgaacggaggcaaatccatgagccacaatgaatcaacgtagccagtgagggcaaaagaagggctctgtaacagaaccttacctccaggtgctgttgaattcttctagcagtccttcacccaaaagttcaaatttgtcagtgacatttaccaaacaaacaggcagagttcactattctatctgccattagaccttcttatcatccatactaaagccccattatttagattgagcttgtgcataagaatgccaagcattttagtgaactaaatctgagagaaggactgccaaattttctcatgatctcacctatactttggggatgataatccaaaagtatttcacagcactaatgctgatcaaaatttgctctcccaccaagaaaatgtaaaagaccacaattgttcttcaaaaacaaacaaaacaaaacaaaacaaaattaactgcttaaatgttttgtcggggcaaacaaaattatgtgaattgtgttgttttcttggcttgatgttttctatctacgcttgattcacatgtactcttttctttggcatagtgcaactttatgatttctgaaattcaatggttctattgactttttgcgtcacttaatccaaatcaaccaaattcagggttgaatctgaattggcttctcaggctcaaggtaacagtgttcttgtggtttgaccaattgtttttctttctttttttttttttttagatttgtggtattctggtcaagttattgtgctgtactttgtgcgtagaaattgagttgtattgtcaaccccagtcagtaaagagaacttcaaaaaattatcctcaagtgtagatttctcttaattccatttgtgtatcatgttaaactattgttgtggcttcttgtgtaaagacaggaactgtggaactgtgatgttgtcttttgtgttgttaaaataagaaatgtcttatctgtatatgtatgagtcttcctgtcattgtatttggcacatgaatattgtgtacaaggaattgttaagactggttttccctcaacaacatatattatacttgctactggaaaagtgtttaagacttagctaggtttccatttagatcttcatatctgttgcatggaagaaagttgggttcttggcatagagttgcatgatatgtaagattttgtgcattcataattgttaaaaatctgtgttccaaaagtggacatagcatgtacaggcagttttctgtcctgtgcacaaaaagtttaaaaaagttgtttaatatttgttgttgtatacccaaatacgcaccgaataaactctttatattcattcaaagaat

SEQ ID NO: 12836 - protein, 313 aa, Homo sapiens; identical to SEQ ID NO: 12834

SEQ ID NO: 12837 - DNA, 554 bp, Homo sapiens
gtggctctctaggaccggagagttctttggaaggagagcgcgagcgagggagcgggcgagctccgagggggtgtgggtgtagggagagagagaaagagagcaggcagcggcggcggcggcagcggtggggaaaagcggattccgccccgaaccacaccgaggggagctcgtggtcgagacttgccgccctaagcactctcccaagtccgacccgctcggcgaggacttccgtcttctgagcgaaccttgtcaagcaagctgggatctatgagtggaaaggtgaccaagcccaaagaggagaaagatgcttctaagggaccgggattagctccagaatgtaaactggagacagcagccttggagaccggggtgcggagaggcacagagagggaatatggaagagcagtggggaacagcaggtgccttaggtgcaagtgtccgaatggccacggagcagacgctggagtgggctggactagccctgagggccccaagcacactggaccgcagcgacccacgccgagtccccactgcagaagtgaggttgcagcgca

SEQ ID NO: 12838 - protein, 94 aa, Homo sapiens
MSGKVTKPKEEKDASKGPGLAPECKLETAALETGVRRGTEREYGRAVGNSRCLRCKCPNGHGADAGVGWTSPEGPKHTGPQRPTPSPHCRSEVA

SEQ ID NO: 12839 - DNA, 513 bp, Homo sapiens
cgggcgagctccgagggggtgtgggtgtagggagagagagaaagagagcaggtaagggccatcgtctcccactcctccgccggcgagcaactccggccccctttttggcaaaataataggaacctggaaatggattaaatagaaagaaagaaaagaggcgggggaaagcagcctgccagtgcgcgggcagcccacccaggcaactcccagcgagcggcccgcgcggagcccagggaggccggcagtgaagccggggagtcccggccgctcctctcggccgccccgggggttgcgagcgtggctctccgcaggcgggcagaagctgagggcgcggggcgcggaggaagcgccgcgccgctttgtctcttcacttcttgagcgcggcgagcggctcctcccgcggccggccgctcgggatcgcggcggcggcggcggcgacggcggctcctccttcacccctttcctttcctccccactctctcgtaggcagcggcggcggcggcagcggtgggg

SEQ ID NO: 12840 - protein, 122 aa, Homo sapiens [sequence omitted]

SEQ ID NO: 12841 - DNA, 318 bp, Homo sapiens
ctgctagcacgttttcacctctcaatacaagaagctacttcatagaagaagcaaacttagaatacatttaagtttgcgttcaaactcttcacttcccaataccagtgggaaaatgaccacaaaaacacctttgaagactatatttattattggtgaagattggaggaaataaacttttcatatatcgactactgtaggaaggcctgagacaaaacaatgttgaaattaggccaactgagagccctataatggcatctaagtgtttcagtgaaaggaagaatcacatctctcactttaaatcaaaagctaggaatcatt

SEQ ID NO: 12842 - protein, 31 aa, Homo sapiens
NTFKFAFKLFTSQYQWENDHKNTFEDYIYYW

SEQ ID NO: 12843 - DNA, 1183 bp, Homo sapiens
gatgagaccagaggccgaactcaggttctgatggccgagctgccccacaggatcatcaaggaaacccagcgtttgctggcagagccagttcctggcatcaaagcagaaccagatgaaagcaacgcccgttattttcatgtggtcattgctggggaatcaaaggattccccctttgagggagggacttttaaacgtgaactattacttgcagaagaatacccaatggcagcccctaaagtacgtttcatgaccaaaatttatcatccaaatgtagacaagttggaaagaataagtttagatattttgaaagataagtggtccccagccctgcagatccgcacagttctgctatcgatccaggccttgttaaatgctcccaatccagatgatccattagcaaatgatgtagtggagcagtggaagaccaacgaagcccaagccattgaaacagctagagcatggactaggctatatgccatgaatagtatttaaattgatccaatcattaagtgtgcatcacttctcctgttctgccaagacttcttcctttttgcttgcatttaatggacatagtcttagaaacattacagaataaaaaaacccagacatcttcagttatttggtgattaaatgtacattagcaaatctatgtcttgtcctgattcactgtcataaagcatgagcagaggctagacgtatcatccggattgttgtgaaacgtttaaaagcagtggtccctccctgcttttattcatttcccccatcctggtttaagtataaagcactgtgaatgaaggtagttgtcaggttagctgcaagggtgtgggtgtttttctttattttatttttttgaggggggtaagtagttttattttaattttatgggctcctttccccgcctttttggtgatctaattggattggttaaaagcagctaaccagttctttagaaatatgctctctatccaagtctaactttatttagacactgtagatggacaagcttgattgtttgaaccaaaatgggaacatttaacaagcatcactgccctcactaataacattgtgactttgctgtcaagtgtagagtccccccttcaaaataagcttgtgaccattttgtatggcttgtctggaaacttctgtaaatcttatgttttactaaaatattttttgttattgt

SEQ ID NO: 12844 - protein, 153 aa, Homo sapiens; identical to SEQ ID NO: 2210

SEQ ID NO: 12845 - DNA, 2389 bp, Homo sapiens
gggatttggagtttccctccgcagcggcggcggcggctgcccctcggctccaggagaggccgccacccggggttccggtggcgttaggctgcagcagtggcgcttcccgccgcccgagcttcggaaacttcccggccgcgacgcagggaaccggcgcggagaaccgagcagagcggagcgcccgtggtccagcgtgtagggagccgatcgcccatggagggtctgggccgctcgtgcctgtggctgcgtcgggagctgtcgcccccgcggccgcggctcctgctcctggactgccgcagccgcgagctgtacgagtcggcgcgcatcggtggggcgctgagcgtggccctgccggcgctcctgctgcgccgcctgcggaggggcagcctgtcggtgcgcgcgctcctgcctgggccgccgctgcagccgcccccgcctgcccccgtgctcctgtacgaccagggcgggggccggcgccggcgcggggaggccgaggccgaggccgaggagtgggaggccgagtcggtgctgggcaccctgctgcagaagctgcgagaggaaggctacctggcctactacctccagggaggcttcagcagattccaggccgagtgccctcacctgtgtgagaccagccttgctggccgtgccggctccagcatggcgccggtgcccggtccagtgcccgtggtggggttgggcagcctgtgcctgggctccgactgctctgatgcggaatccgaggctgaccgcgactccatgagctgtggcctggattcggagggtgccacacccccaccagtggggctgcgggcatccttccctgtccagatcctgcccaacctctatctgggcagtgcccgggattccgccaatttggagagcctggccaaactgggcatccgctacatcctcaatgtcacccccaacctcccaaacttcttcgagaagaatggtgactttcactacaagcagatccccatctccgaccactggagccagaacctgtcgcggttctttccggaggccattgagttcattgatgaggccttgtcccagaactgcggggtgctcgtccactgcttggcgggggtcagccgttctgtcaccgtcactgtggcctacctcatgcagaagctccacctctctctcaacgatgcctatgacctggtcaagaggaagaagtctaacatctcccccaacttcaacttcatggggcagttgctggactttgagcgcagcttgcggctggaggagcgccactcgcaggagcagggcagtggggggcaggcatctgcggcctccaacccgccctccttcttcaccacccccaccagtgatggcgccttcgagctggcccccacctagggccccgtggccggcaggccggcccctgccccacccccacccacgggtgtccctgcccactcgtgtggcaagggaggggagggcaggagggctcggcctgagcagggtgctggggggagagcgcaatacctcacgcgggctgccgtcctaatcaacgtgcctatggcgggaccacgctcggagcctgcctcttctgcgactgttactttttctttgcgggatgggggtgggggttccctctccaggtggttgtccaggcccatgtcccggccctgggtgctcagccagctcggctaggccctgcgcctccctgcgcttcccccttcaggaagggtgtgtgccacctcgttgcactggatcccagtggctgcttgggggagaggcgtttgccatcactggtgttgtcacctccctgtttctccaccaagggcttgggcctctcggggctggggcctcccaggggatggggacccagagtgcagtggccgcccacatccatggcctaggagctactgggcaggttcccggccacacatctggtgggctgttttgttttttttttttcctcttcccccagatgtcttgacgggatcactggggctctttgtgagtgagggtggccaaactaccgccggaggagatggggtctcagagcgagagctgcggagggggaggggaagaagaaggcctcacttttgctgctgcggggcccacacagccgctgctactttggggggtggggaaggggccaagctgcagacacacacagtcattcatttctgtccacacccctgtgggtggcgggtgtgcgtgtgtgtgcttgtgtgtgcgcacgtgtcggcgctcacacacacatgctagcccactgatgcacccagcccagggctggcagtctttgcagcgtggggccgtctcaccctggagcctggagaggatctatgcttgtttgtttttgtaatccatatcatagttgctttctttaattgttccttctgaataaacagtttatttaagatactga

SEQ ID NO: 12846 - protein, 384 aa, Homo sapiens; identical to SEQ ID NO: 2213

SEQ ID NO: 12847 - DNA, 2087 bp, Homo sapiens
ctagcttggcctcttccctaagaaataaagaaggcactttggggtccaaggtagggtacttagatgtggaagcaaggggccccggggaggggcggggaggcggcggagagagcccggcgtgcagccgcccccgcctgcccccgtgctcctgtacgaccagggcgggggccggcgccggcgcggggaggccgaggccgaggccgaggagtgggaggccgagtcggtgctgggcaccctgctgcagaagctgcgagaggaaggctacctggcctactacctccagggaggcttcagcagattccaggccgagtgccctcacctgtgtgagaccagccttgctggccgtgccggctccagcatggcgccggtgcccggtccagtgcccgtggtggggttgggcagcctgtgcctgggctccgactgctctgatgcggaatccgaggctgaccgcgactccatgagctgtggcctggattcggagggtgccacacccccaccagtggggctgcgggcatccttccctgtccagatcctgcccaacctctatctgggcagtgcccgggattccgccaatttggagagcctggccaaactgggcatccgctacatcctcaatgtcacccccaacctcccaaacttcttcgagaagaatggtgactttcactacaagcagatccccatctccgaccactggagccagaacctgtcgcggttctttccggaggccattgagttcattgatgaggccttgtcccagaactgcggggtgctcgtccactgcttggcgggggtcagccgttctgtcaccgtcactgtggcctacctcatgcagaagctccacctctctctcaacgatgcctatgacctggtcaagaggaagaagtctaacatctcccccaacttcaacttcatggggcagttgctggactttgagcgcagcttgcggctggaggagcgccactcgcaggagcagggcagtggggggcaggcatctgcggcctccaacccgccctccttcttcaccacccccaccagtgatggcgccttcgagctggcccccacctagggccccgtggccggcaggccggcccctgccccacccccacccacgggtgtccctgcccactcgtgtggcaagggaggggagggcaggagggctcggcctgagcagggtgctggggggagagcgcaatacctcacgcgggctgccgtcctaatcaacgtgcctatggcgggaccacgctcggagcctgcctcttctgcgactgttactttttctttgcgggatgggggtgggggttccctctccaggtggttgtccaggcccatgtcccggccctgggtgctcagccagctcggctaggccctgcgcctccctgcgcttcccccttcaggaagggtgtgtgccacctcgttgcactggatcccagtggctgcttgggggagaggcgtttgccatcactggtgttgtcacctccctgtttctccaccaagggcttgggcctctcggggctggggcctcccaggggatggggacccagagtgcagtggccgcccacatccatggcctaggagctactgggcaggttcccggccacacatctggtgggctgttttgttttttttttttcctcttcccccagatgtcttgacgggatcactggggctctttgtgagtgagggtggccaaactaccgccggaggagatggggtctcagagcgagagctgcggagggggaggggaagaagaaggcctcacttttgctgctgcggggcccacacagccgctgctactttggggggtggggaaggggccaagctgcagacacacacagtcattcatttctgtccacacccctgtgggtggcgggtgtgcgtgtgtgtgcttgtgtgtgcgcacgtgtcggcgctcacacacacatgctagcccactgatgcacccagcccagggctggcagtctttgcagcgtggggccgtctcaccctggagcctggagaggatctatgcttgtttgtttttgtaatccatatcatagttgctttctttaattgttccttctgaataaacagtttatttaagatactga

SEQ ID NO: 12848 - protein, 235 aa, Homo sapiens
MAPVPGPVPVVGLGSLCLGSDCSDAESEADRDSMSCGLDSEGATPPPVGLRASFPVQILPNLYLGSARDSANLESLAKLGIRYILNVTPNLPNFFEKNGDFHYKQIPISDHWSQNLSRFFPEAIEFIDEALSQNCGVLVHCLAGVSRSVTVTVAYLMQKLHLSLNDAYDLVKRKKSNISPNFNFMGQLLDFERSLRLEERHSQEQGSGGQASAASNPPSFFTTPTSDGAFELAPT

SEQ ID NO: 12849 - DNA, 2441 bp, Homo sapiens
agtttccaaggtggaagctgggtccggctgccaggaagcggccggtgcgcgggctgcgcgggctgcgcggggctcggcttccacgtgcgagcctgcaccgccgccccgccctctcctggcggccaggcctggggactctctgccgcgggacggcgcctcgcgttccgccgtggcagtggccgtggccagaacgtccacgcgcggtcgtccaccgccggatctcgctccagcgcccgtggtccagcgtgtagggagccgatcgcccatggagggtctgggccgctcgtgcctgtggctgcgtcgggagctgtcgcccccgcggccgcggctcctgctcctggactgccgcagccgcgagctgtacgagtcggcgcgcatcggtggggcgctgagcgtggccctgccggcgctcctgctgcgccgcctgcggaggggcagcctgtcggtgcgcgcgctcctgcctgggccgccgctgcagccgcccccgcctgcccccgtgctcctgtacgaccagggcgggggccggcgccggcgcggggaggccgaggccgaggccgaggagtgggaggccgagtcggtgctgggcaccctgctgcagaagctgcgagaggaaggctacctggcctactacctccagggaggcttcagcagattccaggccgagtgccctcacctgtgtgagaccagccttgctggccgtgccggctccagcatggcgccggtgcccggtccagtgcccgtggtggggttgggcagcctgtgcctgggctccgactgctctgatgcggaatccgaggctgaccgcgactccatgagctgtggcctggattcggagggtgccacacccccaccagtggggctgcgggcatccttccctgtccagatcctgcccaacctctatctgggcagtgcccgggattccgccaatttggagagcctggccaaactgggcatccgctacatcctcaatgtcacccccaacctcccaaacttcttcgagaagaatggtgactttcactacaagcagatccccatctccgaccactggagccagaacctgtcgcggttctttccggaggccattgagttcattgatgaggccttgtcccagaactgcggggtgctcgtccactgcttggcgggggtcagccgttctgtcaccgtcactgtggcctacctcatgcagaagctccacctctctctcaacgatgcctatgacctggtcaagaggaagaagtctaacatctcccccaacttcaacttcatggggcagttgctggactttgagcgcagcttgcggctggaggagcgccactcgcaggagcagggcagtggggggcaggcatctgcggcctccaacccgccctccttcttcaccacccccaccagtgatggcgccttcgagctggcccccacctagggccccgtggccggcaggccggcccctgccccacccccacccacgggtgtccctgcccactcgtgtggcaagggaggggagggcaggagggctcggcctgagcagggtgctggggggagagcgcaatacctcacgcgggctgccgtcctaatcaacgtgcctatggcgggaccacgctcggagcctgcctcttctgcgactgttactttttctttgcgggatgggggtgggggttccctctccaggtggttgtccaggcccatgtcccggccctgggtgctcagccagctcggctaggccctgcgcctccctgcgcttcccccttcaggaagggtgtgtgccacctcgttgcactggatcccagtggctgcttgggggagaggcgtttgccatcactggtgttgtcacctccctgtttctccaccaagggcttgggcctctcggggctggggcctcccaggggatggggacccagagtgcagtggccgcccacatccatggcctaggagctactgggcaggttcccggccacacatctggtgggctgttttgttttttttttttcctcttcccccagatgtcttgacgggatcactggggctctttgtgagtgagggtggccaaactaccgccggaggagatggggtctcagagcgagagctgcggagggggaggggaagaagaaggcctcacttttgctgctgcggggcccacacagccgctgctactttggggggtggggaaggggccaagctgcagacacacacagtcattcatttctgtccacacccctgtgggtggcgggtgtgcgtgtgtgtgcttgtgtgtgcgcacgtgtcggcgctcacacacacatgctagcccactgatgcacccagcccagggctggcagtctttgcagcgtggggccgtctcaccctggagcctggagaggatctatgcttgtttgtttttgtaatccatatcatagttgctttctttaattgttccttctgaataaacagtttatttaagatactga

SEQ ID NO: 12850 - protein, 384 aa, Homo sapiens; identical to SEQ ID NO: 2213

SEQ ID NO: 12851 - DNA, 574 bp, Homo sapiens
atgaaggccccgggcacacgactagagtaccaggtggtgggtcgctgcctgcccgcccccaaatgccacacaccgcccctctaccgcatgcgaatctttgctcctaatcatgtcgtcgctaagtcccacttctggtacttcgtatctcagttaaagaagctgaagaagtcttcaggggagattgtctactgtgggcaggtgtttgagaagcgccccctgcgggtgaagaacttcggcatctggctgcgctatgactcccggcgcggcacccacaacatataccgggaataccgggacctgaccaccgcgggcgctgtcaccaagtgctatcgagacatgggcgcccggcaccgcgcccgggcccactccatccagatcaggaaggtggaggacatcgcagccagcaagtgccgccggccgaccgtcaagcagttccacgactccaagatcaagttcccgctgccccacagggtcctgcgccgtcagcacaaaccacgcttcaccaccaagaggcccgataccttcttctaagggcagggccctcgcccgggtgtgccccaaataaactcaggaa

SEQ ID NO: 12852 - protein, 176 aa, Homo sapiens; identical to SEQ ID NO: 2215

SEQ ID NO: 12853 - DNA, 2148 bp, Homo sapiens
cgacgctgcggcacccgctccagacatgctgctgctgaagaaacacacggaggacatcagcagcgtctacgagatccgcgagaggctcggctcggggccctccccgctccactctctctccctcctgcctctcctctcttcccacttccttcccacctcccaccgccccgtctgcggcaggggtgccttctccgaggtggtgctggcccaggagcggggctccgcacacctcgtggccctcaagtgcatccccaagaaggccctccggggcaaggaggccctggtggagaacgagatcgcagtgctccgtaggatcagtcaccccaacatcgtcgctctggaggatgtccacgagagcccttcccacctctacctggccatggaactgtgaggagggcctgggcaggctgtgggagccggggagggactgagcagtgagtggggctgaaggccaggctgagtgcctgggtcagccaaacccctggcacccccagggtgacgggtggcgagctgtttgaccgcatcatggagcgcggctcctacacagagaaggatgccagccatctggtgggtcaggtccttggcgccgtctcctacctgcacagcctggggatcgtgcaccgggacctcaaggtgcctggctggggcctctgcaccccaccctcccacctgcccacctggccctgcctttgttttcccgggagcacggctggggcctttcttgatctcctgctccaccaaggctctggggaacctgagagtgcctagtccccatcctgtcccagcaccggcaccgcgtcaggactgactggcccttttcccggtgtccgtgtgtcacagcccgaaaacctcctgtatgccacgccctttgaggactcgaagatcatggtctctgactttggactctccaaaatccaggctgggaacatgctaggcaccgcctgtgggacccctggatatgtgggtgagggacgacaccctgaggcttgctgggagtggggtggcctgggggaccctagacagccgggaaggctgttgtgcccgttgcctttgtgtgggccattcctgggcttgagtaggccgagccagtgacactgagcggcatggctgcgtgtgtgcctgtgcgtgcgtctgtctgtctctggcccccagccccagagctcttggagcagaaaccctacgggaaggccgtagatgtgtgggccctgggcgtcatctcctacatcctgtgagtgaccgctgggaaggcttgtctcctgcctgcctgcccctgctgggttggggagggtgggacagctggatgattcatctgtgggtgccaggctgtgtgggtacccccccttctacgacgagagcgaccctgagctcttcagccagatcctgagggccagctatgagtttgactctcctttctgggatgacatctcagaatcagccaaagacttcatccggcaccttctggagcgagacccccagaagaggttcacctgccaacaggccttgcggcacctttggatctctggggacacagccttcgacagggacatcttaggctctgtcagtgagcagatccggaagaactttgctcggacacactggaagcgagccttcaatgccacctcgttcctgcgccacatccggaagctggggcagatcccagagggcgagggggcctctgagcagggcatggcccgccacagccactcaggcctccgtgctggccagccccccaagtggtgatgcccaggcagatgccgaggccaagtggactgacccccagatttccttcccttggatgctttcggtcccctcccccaacccctccccctggggctggcctctgctggattttgagatttgagggtgtggcgcatggcgctggggttggaatggggcacccccaagtctgtccccaggctctgccctgcctgggggcagtggctcccctcccctgttgcctctcccgcccctgccccccccgccccgccaaaagccgagggggtgctggcaggcgggcctcaggggctgtctttcctgcacggctgttgtgtgcttcgctgagtgtgggtggtcctgcttgtgtcatggtcatggccttccagccccctccagttttccccaaaccaataaagaaagatacagcaatgg

SEQ ID NO: 12854 - protein, 135 aa, Homo sapiens
MPRQMPRPSGLTPRFPSLGCFRSPPPTPPPGAGLCWILRFEGVAHGAGVGMGHPQVCPQALPCLGAVAPLPCCLSRPCPPRPAKSRGGAGRRASGAVFPARLLCASLSVGGPACVMVMAFQPPPVFPKPIKKDTA

SEQ ID NO: 12855 - DNA, 1563 bp, Homo sapiens
atgatctcaataaaaggaatgctctggctgctgggtagagaagaaagcgaggacatgctgctgctgaagaaacacacggaggacatcagcagcgtctacgagatccgcgagaggctcggctcgggtgccttctccgaggtggtgctggcccaggagcggggctccgcacacctcgtggccctcaagtgcatccccaagaaggccctccggggcaaggaggccctggtggagaacgagatcgcagtgctccgtaggatcagtcaccccaacatcgtcgctctggaggatgtccacgagagcccttcccacctctacctggccatggaactggtgacgggtggcgagctgtttgaccgcatcatggagcgcggctcctacacagagaaggatgccagccatctggtgggtcaggtccttggcgccgtctcctacctgcacagcctggggatcgtgcaccgggacctcaagcccgaaaacctcctgtatgccacgccctttgaggactcgaagatcatggtctctgactttggactctccaaaatccaggctgggaacatgctaggcaccgcctgtgggacccctggatatgccgagccagtgacactgagcggcatggctgcgtgtgtgcctgtgcgtgcgtctgtctgtctctggcccccagccccagagctcttggagcagaaaccctacgggaaggccgtagatgtgtgggccctgggcgtcatctcctacatcctgctgtgtgggtacccccccttctacgacgagagcgaccctgagctcttcagccagatcctgagggccagctatgagtttgactctcctttctgggatgacatctcagaatcagccaaagacttcatccggcaccttctggagcgagacccccagaagaggttcacctgccaacaggccttgcggcacctttggatctctggggacacagccttcgacagggacatcttaggctctgtcagtgagcagatccggaagaactttgctcggacacactggaagcgagccttcaatgccacctcgttcctgcgccacatccggaagctggggcagatcccagagggcgagggggcctctgagcagggcatggcccgccacagccactcaggcctccgtgctggccagccccccaagtggtgatgcccaggcagatgccgaggccaagtggactgacccccagatttccttcccttggatgctttcggtcccctcccccaacccctccccctggggctggcctctgctggattttgagatttgagggtgtggcgcatggcgctggggttggaatggggcacccccaagtctgtccccaggctctgccctgcctgggggcagtggctcccctcccctgttgcctctcccgcccctgccccccccgccccgccaaaagccgagggggtgctggcaggcgggcctcaggggctgtctttcctgcacggctgttgtgtgcttcgctgagtgtgggtggtcctgcttgtgtcatggtcatggccttccagccccctccagttttccccaaaccaataaagaaagatacagcaatgg

SEQ ID NO: 12856 - protein, 384 aa, Homo sapiens
MISIKGMLWLLGREESEDMLLLKKHTEDISSVYEIRERLGSGAFSEVVLAQERGSAHLVALKCIPKKALRGKEALVENEIAVLRRISHPNIVALEDVHESPSHLYLAMELVTGGELFDRIMERGSYTEKDASHLVGQVLGAVSYLHSLGIVHRDLKPENLLYATPFEDSKIMVSDFGLSKIQAGNMLGTACGTPGYAEPVTLSGMAACVPVRASVCLWPPAPELLEQKPYGKAVDVWALGVISYILLCGYPPFYDESDPELFSQILRASYEFDSPFWDDISESAKDFIRHLLERDPQKRFTCQQALRHLWISGDTAFDRDILGSVSEQIRKNFARTHWKRAFNATSFLRHIRKLGQIPEGEGASEQGMARHSHSGLRAGQPPKW

SEQ ID NO: 12857 - DNA, 915 bp, Homo sapiens
atgctgctgctgaagaaacacacggaggacatcagcagcgtctacgagatccgcgagaggctcggctcgatcagtcaccccaacatcgtcgctctggaggatgtccacgagagcccttcccacctctacctggccatggaactgtgaggagggcctgggcaggctgtgggagccggggagggactgagcagtgagtggggctgaaggccaggctgagtgcctgggtcagccaaacccctggcacccccagggtgacgggtggcgagctgtttgaccgcatcatggagcgcggctcctacacagagaaggatgccagccatctggtgggtcaggtccttggcgccgtctcctacctgcacagcctggggatcgtgcaccgggacctcaaggtgcctggctggggcctctgcaccccaccctcccacctgcccacctggccctgcctttgttttcccgggagcacggctggggcctttcttgatctcctgctccaccaaggctctggggaacctgagagtgcctagtccccatcctgtcccagcaccggcaccgcgtcaggactgactggcccttttcccggtgtccgtgtgtcacagcccgaaaacctcctgtatgccacgccctttgaggactcgaagatcatggtctctgactttggactctccaaaatccaggctgggaacatgctaggcaccgcctgtgggacccctggatatgtgggtgagggacgacaccctgaggcttgctgggagtggggtggcctgggggaccctagacagccgggaaggctgttgtgcccgttgcctttgtgtgggccattcctgggcttgagtaggccgagccagtgacactgagcggcatggctgcgtgtgtgcctgtgcgtgcgtctgtctgtctctggcccccagccccaga

SEQ ID NO: 12858 - protein, 48 aa, Homo sapiens
MLLLKKHTEDISSVYEIRERLGSISHPNIVALEDVHESPSHLYLAMEL

SEQ ID NO: 12859 - DNA, 1119 bp, Homo sapiens
ggagccttctggaaagcggccggatgtgtggaggcagagaggcagcatccaggcgctggtcgccttcgggacatgctgctgctgaagaaacacacggaggacatcagcagcgtctacgagatccgcgagaggctcggctcgggtgccttctccgaggtggtgctggcccaggagcggggctccgcacacctcgtggccctcaagtgcatccccaagaaggccctccggggcaaggaggccctggtggagaacgagatcgcagtgctccgtaggatcagtcaccccaacatcgtcgctctggaggatgtccacgagagcccttcccacctctacctggccatggaactgtgaggagggcctgggcaggctgtgggagccggggagggactgagcagtgagtggggctgaaggccaggctgagtgcctgggtcagccaaacccctggcacccccagggtgacgggtggcgagctgtttgaccgcatcatggagcgcggctcctacacagagaaggatgccagccatctggtgggtcaggtccttggcgccgtctcctacctgcacagcctggggatcgtgcaccgggacctcaaggtgcctggctggggcctctgcaccccaccctcccacctgcccacctggccctgcctttgttttcccgggagcacggctggggcctttcttgatctcctgctccaccaaggctctggggaacctgagagtgcctagtccccatcctgtcccagcaccggcaccgcgtcaggactgactggcccttttcccggtgtccgtgtgtcacagcccgaaaacctcctgtatgccacgccctttgaggactcgaagatcatggtctctgactttggactctccaaaatccaggctgggaacatgctaggcaccgcctgtgggacccctggatatgtgggtgagggacgacaccctgaggcttgctgggagtggggtggcctgggggaccctagacagccgggaaggctgttgtgcccgttgcctttgtgtgggccattcctgggcttgagtaggccgagccagtgacactgagcggcatggctgcgtgtgtgcctgtgcgtgcgtctgtctgtctctggcccccagccccaga

SEQ ID NO: 12860 - protein, 92 aa, Homo sapiens [sequence omitted]

SEQ ID NO: 12861 - DNA, 1083 bp, Homo sapiens
actgcgcggcacgacgctgcggcacccgctccagacatgctgctgctgaagaaacacacggaggacatcagcagcgtctacgagatccgcgagaggctcggctcgggtgccttctccgaggtggtgctggcccaggagcggggctccgcacacctcgtggccctcaagtgcatccccaagaaggccctccggggcaaggaggccctggtggagaacgagatcgcagtgctccgtaggatcagtcaccccaacatcgtcgctctggaggatgtccacgagagcccttcccacctctacctggccatggaactgtgaggagggcctgggcaggctgtgggagccggggagggactgagcagtgagtggggctgaaggccaggctgagtgcctgggtcagccaaacccctggcacccccagggtgacgggtggcgagctgtttgaccgcatcatggagcgcggctcctacacagagaaggatgccagccatctggtgggtcaggtccttggcgccgtctcctacctgcacagcctggggatcgtgcaccgggacctcaaggtgcctggctggggcctctgcaccccaccctcccacctgcccacctggccctgcctttgttttcccgggagcacggctggggcctttcttgatctcctgctccaccaaggctctggggaacctgagagtgcctagtccccatcctgtcccagcaccggcaccgcgtcaggactgactggcccttttcccggtgtccgtgtgtcacagcccgaaaacctcctgtatgccacgccctttgaggactcgaagatcatggtctctgactttggactctccaaaatccaggctgggaacatgctaggcaccgcctgtgggacccctggatatgtgggtgagggacgacaccctgaggcttgctgggagtggggtggcctgggggaccctagacagccgggaaggctgttgtgcccgttgcctttgtgtgggccattcctgggcttgagtaggccgagccagtgacactgagcggcatggctgcgtgtgtgcctgtgcgtgcgtctgtctgtctctggcccccagccccaga

SEQ ID NO: 12862 - protein, 92 aa, Homo sapiens [sequence omitted]

SEQ ID NO: 12863 - DNA, 1121 bp, Homo sapiens
gagagctgcaggagggtgacatgatctcaataaaaggaatgctctggctgctgggtagagaagaaagcgaggacatgctgctgctgaagaaacacacggaggacatcagcagcgtctacgagatccgcgagaggctcggctcgggtgccttctccgaggtggtgctggcccaggagcggggctccgcacacctcgtggccctcaagtgcatccccaagaaggccctccggggcaaggaggccctggtggagaacgagatcgcagtgctccgtaggatcagtcaccccaacatcgtcgctctggaggatgtccacgagagcccttcccacctctacctggccatggaactgtgaggagggcctgggcaggctgtgggagccggggagggactgagcagtgagtggggctgaaggccaggctgagtgcctgggtcagccaaacccctggcacccccagggtgacgggtggcgagctgtttgaccgcatcatggagcgcggctcctacacagagaaggatgccagccatctggtgggtcaggtccttggcgccgtctcctacctgcacagcctggggatcgtgcaccgggacctcaaggtgcctggctggggcctctgcaccccaccctcccacctgcccacctggccctgcctttgttttcccgggagcacggctggggcctttcttgatctcctgctccaccaaggctctggggaacctgagagtgcctagtccccatcctgtcccagcaccggcaccgcgtcaggactgactggcccttttcccggtgtccgtgtgtcacagcccgaaaacctcctgtatgccacgccctttgaggactcgaagatcatggtctctgactttggactctccaaaatccaggctgggaacatgctaggcaccgcctgtgggacccctggatatgtgggtgagggacgacaccctgaggcttgctgggagtggggtggcctgggggaccctagacagccgggaaggctgttgtgcccgttgcctttgtgtgggccattcctgggcttgagtaggccgagccagtgacactgagcggcatggctgcgtgtgtgcctgtgcgtgcgtctgtctgtctctggcccccagccccaga

SEQ ID NO: 12864 - protein, 110 aa, Homo sapiens
MISIKGMLWLLGREESEDMLLLKKHTEDISSVYEIRERLGSGAFSEVVLAQERGSAHLVALKCIPKKALRGKEALVENEIAVLRRISHPNIVALEDVHESPSHLYLAMEL

SEQ ID NO: 12865 - DNA, 565 bp, Homo sapiens
gagcgcgcagcggcaatggctgaggcctgcctggcagggggtggaggaggaagctgcccttgcccccggcggggcggggagagacccccatcacctctcccctgcccctgcagacatgctgctgctgaagaaacacacggaggacatcagcagcgtctacgagatccgcgagaggctcggctcgggtgccttctccgaggtggtgctggcccaggagcggggctccgcacacctcgtggccctcaagtgcatccccaagaaggccctccggggcaaggaggccctggtggagaacgagatcgcagtgctccgtaggatcagtcaccccaacatcgtcgctctggaggatgtccacgagagcccttcccacctctacctggccatggaactgtgaggagggcctgggcaggctgtgggagccggggagggactgagcagtgagtggggctgaaggccaggctgagtgcctgggtcagccaaacccctggcacccccagggtgacgggtggcgagctgtttgaccgcatcatggagcgcggctcctacacagagaaggatgccagcc

SEQ ID NO: 12866 - protein, 99 aa, Homo sapiens [sequence omitted]

SEQ ID NO: 12867 - DNA, 629 bp, Homo sapiens
atgctgctgctgaagaaacacacggaggacatcagcagcgtctacgagatccgcgagaggctcggctcgtgagtgtgcgcgcgcgtgtgtgatcgtgtgtgtgtgtgtgtgtgtgtgtgtgtacctgtgtgagatggcatgtgtgtgtgactacgcgagtgggtgtgagatgatgtgtgtgtgtgtgaatatgtaggggtgtgtgaatgtgagtgagtctgtgagatggcatgtgtgagtggtggtggggggtggcacagggccaggtagggcctccccatctccttcacagggggccctccccgctccactctctctccctcctgcctctcctctcttcccacttccttcccacctcccaccgccccgtctgcggcaggggtgccttctccgaggtggtgctggcccaggagcggggctccgcacacctcgtggccctcaagtgcatccccaagaaggccctccggggcaaggaggccctggtggagaacgagatcgcagtgctccgtaggatcagtcaccccaacatcgtcgctctggaggatgtccacgagagcccttcccacctctacctggccatggaactgtgaggagggcctgggcaggctgtgggagccggggagggactg

SEQ ID NO: 12868 - protein, 119 aa, Homo sapiens [sequence omitted]

SEQ ID NO: 12869 - DNA, 365 bp, Homo sapiens
atgctgctgctgaagaaacacacggaggacatcagcagcgtctacgagatccgcgagaggctcggctcggggccctccccgctccactctctctccctcctgcctctcctctcttcccacttccttcccacctcccaccgccccgtctgcggcaggggtgccttctccgaggtggtgctggcccaggagcggggctccgcacacctcgtggccctcaagtgcatccccaagaaggccctccggggcaaggaggccctggtggagaacgagatcgcagtgctccgtaggatcagtcaccccaacatcgtcgctctggaggatgtccacgagagcccttcccacctctacctggccatggaactgtg

SEQ ID NO: 12870 - protein, 120 aa, Homo sapiens
MLLLKKHTEDISSVYEIRERLGSGPSPLHSLSLLPLLSSHFLPTSHRPVCGRGAFSEVVLAQERGSAHLVALKCIPKKALRGKEALVENEIAVLRRISHPNIVALEDVHESPSHLYLAME

SEQ ID NO: 12871 - DNA, 728 bp, Homo sapiens
caggcagatatctgatcgaagaacattccaggcaggggagcaaaggctagggccgtcaggaggccagtgtggccggggaagaggtggaggaggaggggccagggcagtcgttaggccgccccctaaggactcatgctttgacttggattgacatagagagctgcaggagggtgacatgatctcaataaaaggaatgctctggctgctgggtagagaagaaagcgagggtgagggattaatggtggagccagagggagcccagtgagtgccgggagcccagggtggcagagctgtggtgcagggttgcagggtcctggagctaggcatggaggctgctttcgggcaagtggccgggtcagcctgtcctcggagaggcggtgaaggcagagactggaaggcagagagccttgccgacctgtggccgaagagctctccgggagacagccaccggtggtgcaaaggccctggggccggcccagccgggccgcagctccgggaggcggcgcgagcgagcagtgggctgggcggtggcggccggcacccgagccggatcccggcgattgccttacaagacatgctgctgctgaagaaacacacggaggacatcagcagcgtctacgagatccgcgagaggctcggctcgtgagtgtgcgcgcgcgtgtgtgatcgtgtgtgtgtgtgtgtgtgtgtgtgtgtacctgtgtgagatggcatgtgtgtgtgactac

SEQ ID NO: 12872 - protein, 106 aa, Homo sapiens
MEAAFGQVAGSACPRRGGEGRDWKAESLADLWPKSSPGDSHRWCKGPGAGPAGPQLREAARASSGLGGGGRHPSRIPAIALQDMLLLKKHTEDISSVYEIRERLGS

SEQ ID NO: 12873 - DNA, 586 bp, Homo sapiens
gtgtgtggttgggggagacaggcggtgtcacctgtgcttagaccaggggtggtgggtgggtacccctgaggtggcaaggtcacactgctcatcagaagtttctcactagggtcttctctggcccagcctttgactgaagctggtctggagacaggggcattagagaagtgactcatagatggcctaaagaagcggggccactcaaggacccaggacagagggaagagggccaacccagctggaccacaggcaaaccccattgcctttgagagaaagaagaggacccggtgaagaccatgttgtagaactctgcttgggcaaagcaccattggcgtattagacattctggggaactatctatgtcggtcccaggaaaccattttcacatagaggagcagacgtcgtgtcatgccagggcccacggtcacttgacggaacccttgtgatgctggccacaacctcatgggactggatggcgagcagcgaggggggtccagtaactgttggatgcaggattgaattcggtcacccgcacttatttcctgggctcgtcttggttgggttcgcggagatacactctctggga

SEQ ID NO: 12874 - protein, 46 aa, Homo sapiens
MLATTSWDWMASSEGGPVTVGCRIEFGHPHLFPGLVLVGFAEIHSL

SEQ ID NO: 12875 - DNA, 3935 bp, Homo sapiens
aagagagggatagtcggagcgaggtggcgagtcgctgagcccgccgcggccccgagagcggctgcagccgccgccgccgggaaggagagggcgaggcgcgcccgagccgccgccgccgccgccaccgccgccgccgccaccaccgccaccggagtcgcgggccagccgggcagcctccgcgggccccggccggggcggggggcgcgggccacaggcccctgctccggccgccgcttgcagaccgcgggcgccgatgtcgcccgcgccccgctaggctgagcctcgggtcgggcgaggagccgccgcagccgccgccgcccgagccgcgggcaggagcctcgggagccgccgccgccgccgccgccgcccggccgggccccgccgccgcccgcgcgcccccgggcccccgacacacatgagattcttcaggctcactttcaagtgcttcgtggactgcttctgactgcgccgcccgcgccccgcaccccgccgcccgcccgccgccccgtcccccggcccggccgccccccggcccccggccggcccgcgccctcggggccctccccggtgccgccggtgccccccgcctgaccgccgccccccgtgaggcgccgcgaccccggcccggccgtgcggcccgccgaggccatggcgaagaagagcgccgagaacggcatctatagcgtgtccggcgacgagaagaagggccccctcatcgcgcccgggcccgacggggccccggccaagggcgacggccccgtgggcctggggacacccggcggccgcctggccgtgccgccgcgcgagacctggacgcgccagatggacttcatcatgtcgtgcgtgggcttcgccgtgggcttgggcaacgtgtggcgcttcccctacctgtgctacaagaacggcggaggtgtgttccttattccctacgtcctgatcgccctggttggaggaatccccattttcttcttagagatctcgctgggccagttcatgaaggccggcagcatcaatgtctggaacatctgtcccctgttcaaaggcctgggctacgcctccatggtgatcgtcttctactgcaacacctactacatcatggtgctggcctggggcttctattacctggtcaagtcctttaccaccacgctgccctgggccacatgtggccacacctggaacactcccgactgcgtggagatcttccgccatgaagactgtgccaatgccagcctggccaacctcacctgtgaccagcttgctgaccgccggtcccctgtcatcgagttctgggagaacaaagtcttgaggctgtctgggggactggaggtgccaggggccctcaactgggaggtgaccctttgtctgctggcctgctgggtgctggtctacttctgtgtctggaagggggtcaaatccacgggaaagatcgtgtacttcactgctacattcccctacgtggtcctggtcgtgctgctggtgcgtggagtgctgctgcctggcgccctggatggcatcatttactatctcaagcctgactggtcaaagctggggtcccctcaggtgtggatagatgcggggacccagattttcttttcttacgccattggcctgggggccctcacagccctgggcagctacaaccgcttcaacaacaactgctacaaggacgccatcatcctggctctcatcaacagtgggaccagcttctttgctggcttcgtggtcttctccatcctgggcttcatggctgcagagcagggcgtgcacatctccaaggtggcagagtcagggccgggcctggccttcatcgcctacccgcgggctgtcacgctgatgccagtggccccactctgggctgccctgttcttcttcatgctgttgctgcttggtctcgacagccagtttgtaggtgtggagggcttcatcaccggcctcctcgacctcctcccggcctcctactacttccgtttccaaagggagatctctgtggccctctgttgtgccctctgctttgtcatcgatctctccatggtgactgatggcgggatgtacgtcttccagctgtttgactactactcggccagcggcaccaccctgctctggcaggccttttgggagtgcgtggtggtggcctgggtgtacggagctgaccgcttcatggacgacattgcctgtatgatcgggtaccgaccttgcccctggatgaaatggtgctggtccttcttcaccccgctggtctgcatgggcatcttcatcttcaacgttgtgtactacgagccgctggtctacaacaacacctacgtgtacccgtggtggggtgaggccatgggctgggccttcgccctgtcctccatgctgtgcgtgccgctgcacctcctgggctgcctcctcagggccaagggcaccatggctgagcgctggcagcacctgacccagcccatctggggcctccaccacttggagtaccgagctcaggacgcagatgtcaggggcctgaccaccctgaccccagtgtccgagagcagcaaggtcgtcgtggtggagagtgtcatgtgacaactcagctcacatcaccagctcacctctggtagccatagcagcccctgcttcagccccaccgcacccctccagggggcctgcctttccctgacacttttggggtctgcctgggggaggaggggagaaagcaccatgagtgctcactaaaacaactttttccatttttaataaaacgccaaaaatatcacaacccaccaaaaatagatgcctctccccctccagccctagccgagctggtcctaggccccgcctagtgccccacccccacccacagtgctgcactcctcctgcccctgccacgcccaccccctgcccacctctccaggctctgctctgcagcacacccgtgggtgacccctcaccccagaagcagcagtggcagcttgggaaatgtgaggaagggaaggagggagagacgggagggaggagagagaggagaagggaggcaggggaggggcagcagaaccaaggcaaatatttcagctgggctatacccctctccccatccctgttatagaagcttagagagccagccagcaatggaaccttctggttcctgcgccaatcgccaccagtatcaattgtgtgagcttgggtgcgagtgcacgcgtgcgtgagtacggagagtatatatagatctctatctcttagcaaaggtgaatgccagatgtaaatggcgcctctgggcaaaggaggcttgtattttgcacattttataaaaacttgagagaatgagatttctgcttgtatatttctaaaaagaggaaggagcccaaaccatcctctccttaccactcccatccctgtgagccctaccttacccctctgcccctagccaaggagtgtgaatttatagatctaactttcataggcaaaacaaaagcttcgagctgttgcgtgtgtgagtctgttgtgtggatgtgcgtgtgtggtccccagccccagactggattggaaaagtgcatggtgggggcctcggggctgtccccacgctgtccctttgccacaagtctgtggggcaagaggctgcaatattccgtcctgggtgtctgggctgctaacctggcctgctcaggcttcccaccctgtgcggggcacacccccaggaagggaccctggacacggctcccacgtccaggcttaaggtggatgcacttcccgcacctccagtcttctgtgtagcagctttaacccacgtttgtctgtcacgtccagtcccgagacggctgagtgaccccaagaaaggcttccccgacacccagacagaggctgcagggctggggctgggtgagggtggcgggcctgcggggacattctactgtgctaaaaagccactgcagacatagcaataaaaacatgtcattttccaaagcagg

SEQ ID NO: 12876 - protein, 635 aa, Homo sapiens; identical to SEQ ID NO: 2221

SEQ ID NO: 12877 - DNA, 2210 bp, Homo sapiens
cgcgccctcggggccctccccggtgccgccggtgccccccgcctgaccgccgccccccgtgaggcgccgcgaccccggcccggccgtgcggcccgccgaggccatggcgaagaagagcgccgagaacggcatctatagcgtgtccggcgacgagaagaagggccccctcatcgcgcccgggcccgacggggccccggccaagggcgacggccccgtgggcctggggacacccggcggccgcctggccgtgccgccgcgcgagacctggacgcgccagatggacttcatcatgtcgtgcgtgggcttcgccgtgggcttgggcaacgtgtggcgcttcccctacctgtgctacaagaacggcggaggtgtgttccttattccctacgtcctgatcgccctggttggaggaatccccattttcttcttagagatctcgctgggccagttcatgaaggccggcagcatcaatgtctggaacatctgtcccctgttcaaaggcctgggctacgcctccatggtgatcgtcttctactgcaacacctactacatcatggtgctggcctggggcttctattacctggtcaagtcctttaccaccacgctgccctgggccacatgtggccacacctggaacactcccgactgcgtggagatcttccgccatgaagactgtgccaatgccagcctggccaacctcacctgtgaccagcttgctgaccgccggtcccctgtcatcgagttctgggagaacaaagtcttgaggctgtctgggggactggaggtgccaggggccctcaactgggaggtgaccctttgtctgctggcctgctgggtgctggtctacttctgtgtctggaagggggtcaaatccacgggaaagatcgtgtacttcactgctacattcccctacgtggtcctggtcgtgctgctggtgcgtggagtgctgctgcctggcgccctggatggcatcatttactatctcaagcctgactggtcaaagctggggtcccctcaggtgtggatagatgcggggacccagattttcttttcttacgccattggcctgggggccctcacagccctgggcagctacaaccgcttcaacaacaactgctacaaggacgccatcatcctggctctcatcaacagtgggaccagcttctttgctggcttcgtggtcttctccatcctgggcttcatggctgcagagcagggcgtgcacatctccaaggtggcagagtcagggccgggcctggccttcatcgcctacccgcgggctgtcacgctgatgccagtggccccactctgggctgccctgttcttcttcatgctgttgctgcttggtctcgacagccagtttgtaggtgtggagggcttcatcaccggcctcctcgacctcctcccggcctcctactacttccgtttccaaagggagatctctgtggccctctgttgtgccctctgctttgtcatcgatctctccatggtgactgatggcgggatgtacgtcttccagctgtttgactactactcggccagcggcaccaccctgctctggcaggccttttgggagtgcgtggtggtggcctgggtgtacggagctgaccgcttcatggacgacattgcctgtatgatcgggtaccgaccttgcccctggatgaaatggtgctggtccttcttcaccccgctggtctgcatgggcatcttcatcttcaacgttgtgtactacgagccgctggtctacaacaacacctacgtgtacccgtggtggggtgaggccatgggctgggccttcgccctgtcctccatgctgtgcgtgccgctgcacctcctgggctgcctcctcagggccaagggcaccatggctgagcgctggcagcacctgacccagcccatctggggcctccaccacttggagtaccgagctcaggacgcagatgtcaggggcctgaccaccctgaccccagtgtccgagagcagcaaggtcgtcgtggtggagagtgtcatgtgacaactcagctcacatcaccagctcacctctggtagccatagcagcccctgcttcagccccaccgcacccctccagggggcctgcctttccctgacacttttggggtctgcctgggggaggaggggagaaagcaccatgagtgctcactaaaacaactttttccatttttaataaaacgccaaaaatatcacaacccacc

SEQ ID NO: 12878 - protein, 635 aa, Homo sapiens; identical to SEQ ID NO: 2221

SEQ ID NO: 12879 - DNA, 484 bp, Homo sapiens
ccgcctggccgtgccgccgcgcgagacctggacgcgccagatggacttcatcatgtcgtgcgtgggcttcgccgtgggcttgggcaacgtgtggcgcttcccctacctgtgctacaagaacggcggaggtgtgttccttattccctacgtcctgatcgccctggttggaggaatccccattttcttcttagagatctcgctgggccagttcatgaaggccggcagcatcaatgtctggaacatctgtcccctgttcaaaggtgagcagcccttggccagcctcagggactgcccccttctcccagctggctcccacttgagaaatcttttcctgtcgtgagcaccaggcctggggccacgtgatggcgtcccagtctcgaggggggagcctggaggagatgttcaggacgctggggcacagacaggtggagcgacgtactgaggttgcccactgcaggggcgactgtctccaacactacctcag

SEQ ID NO: 12880 - protein, 99 aa, Homo sapiens
MDFIMSCVGFAVGLGNVWRFPYLCYKNGGGVFLIPYVLIALVGGIPIFFLEISLGQFMKAGSINVWNICPLFKGEQPLASLRDCPLLPAGSHLRNLFLS

SEQ ID NO: 12881 - DNA, 2453 bp, Homo sapiens
gtgaccagacagagtctagccctaaggaagggggaggtactgaaagccaagcaatgctccccaccctgcaaatccagggcccagcagcctttgctcctggggatagaggccctggcaggcactgtcccttccctgtgcccatcacccccactggtgccctcctgccagtctctgactcttgtgacagtctggtggacctggtctggccatctgttacctatcttgccttggggacccagagcagagtctggccacatcccttgggggctcctggtcaggctggggagtcacctgaacaaagaagacagtgtctagagctgtgggacatggccagctccctgggggacaaggtccccagagcagcatgtgggaagagggggcagacagtgtggcagctgcatctcgcctgcctctgcctggcccagttccactctccacctgctcaacccccacctctctccagaagaggagggggacccgacccggatccaatatcccgctccctgcctgggcctcccacacctgcactgcccacacactcatacagctctcactccccacgtgctccacgcctcctgtccccactgaggagagctcccagaggctcgcctgctccccaccgacacgcgtccctgcagacaaacgaggcgcccagggagcttccccactgcacttggccagggctgccggggcgcagccttgcccctagcttcctctggcgggagccatggctcggaggacaatggggacctctgaacatacctgcccgcaagggggaccggaggcgctgggagtgggggtgtgagggaggtggtgccacagcctccgctgagcagcctggccccccagatcgtgtacttcactgctacattcccctacgtggtcctggtcgtgctgctggtgcgtggagtgctgctgcctggcgccctggatggcatcatttactatctcaagcctgactggtcaaagctggggtcccctcaggtgtggatagatgcggggacccagattttcttttcttacgccattggcctgggggccctcacagccctgggcagctacaaccgcttcaacaacaactgctacaaggacgccatcatcctggctctcatcaacagtgggaccagcttctttgctggcttcgtggtcttctccatcctgggcttcatggctgcagagcagggcgtgcacatctccaaggtggcagagtcagggccgggcctggccttcatcgcctacccgcgggctgtcacgctgatgccagtggccccactctgggctgccctgttcttcttcatgctgttgctgcttggtctcgacagccaggtttgcatggggctctgggacagggagccaggaggggggcggagggagggctgcaggcaaggaaaggggtggagggcggtgcggggctcggcctgagctgccctggccacagtttgtaggtgtggagggcttcatcaccggcctcctcgacctcctcccggcctcctactacttccgtttccaaagggagatctctgtggccctctgttgtgccctctgctttgtcatcgatctctccatggtgactgatgtgagtggggtggggggtctgcctgtgacctctggtggccgtctgccatcctccctgactgggctctgtcccccagggcgggatgtacgtcttccagctgtttgactactactcggccagcggcaccaccctgctctggcaggccttttgggagtgcgtggtggtggcctgggtgtacggtaggtcatggctgagggctgggctgggggatggtggcggggaaggcaggtctccagcttggccctcccgcctcacctcgccgcaggagctgaccgcttcatggacgacattgcctgtatgatcgggtaccgaccttgcccctggatgaaatggtgctggtccttcttcaccccgctggtctgcatgggcatcttcatcttcaacgttgtgtactacgagccgctggtctacaacaacacctacgtgtacccgtggtggggtgaggccatgggctgggccttcgccctgtcctccatgctgtgcgtgccgctgcacctcctgggctgcctcctcagggccaagggcaccatggctgagcgctggcagcacctgacccagcccatctggggcctccaccacttggagtaccgagctcaggacgcagatgtcaggggcctgaccaccctgaccccagtgtccgagagcagcaaggtcgtcgtggtggagagtgtcatgtgacaactcagctcacatcaccagctcacctctggtagccatagcagcccctgcttcagccccaccgcacccctccagggggcctgcctttccctgacacttttggggtctgcctgggggaggaggggagaaagcaccatgagtgctcactaaaacaactttttccatttttaataaaacgccaaaaatatcacaacccacc

SEQ ID NO: 12882 - protein, 163 aa, Homo sapiens
MAEGWAGGWWRGRQVSSLALPPHLAAGADRFMDDIACMIGYRPCPWMKWCWSFFTPLVCMGIFIFNVVYYEPLVYNNTYVYPWWGEAMGWAFALSSMLCVPLHLLGCLLRAKGTMAERWQHLTQPIWGLHHLEYRAQDADVRGLTTLTPVSESSKVVVVESVM

SEQ ID NO: 12883 - DNA, 3633 bp, Homo sapiens
gtgaccagacagagtctagccctaaggaagggggaggtactgaaagccaagcaatgctccccaccctgcaaatccagggcccagcagcctttgctcctggggatagaggccctggcaggcactgtcccttccctgtgcccatcacccccactggtgccctcctgccagtctctgactcttgtgacagtctggtggacctggtctggccatctgttacctatcttgccttggggacccagagcagagtctggccacatcccttgggggctcctggtcaggctggggagtcacctgaacaaagaagacagtgtctagagctgtgggacatggccagctccctgggggacaaggtccccagagcagcatgtgggaagagggggcagacagtgtggcagctgcatctcgcctgcctctgcctggcccagttccactctccacctgctcaacccccacctctctccagaagaggagggggacccgacccggatccaatatcccgctccctgcctgggcctcccacacctgcactgcccacacactcatacagctctcactccccacgtgctccacgcctcctgtccccactgaggagagctcccagaggctcgcctgctccccaccgacacgcgtccctgcagacaaacgaggcgcccagggagcttccccactgcacttggccagggctgccggggcgcagccttgcccctagcttcctctggcgggagccatggctcggaggacaatggggacctctgaacatacctgcccgcaagggggaccggaggcgctgggagtgggggtgtgagggaggtggtgccacagcctccgctgagcagcctggccccccagatcgtgtacttcactgctacattcccctacgtggtcctggtcgtgctgctggtgcgtggagtgctgctgcctggcgccctggatggcatcatttactatctcaagcctgactggtcaaagctggggtcccctcaggtgtggatagatgcggggacccagattttcttttcttacgccattggcctgggggccctcacagccctgggcagctacaaccgcttcaacaacaactgctacaaggacgccatcatcctggctctcatcaacagtgggaccagcttctttgctggcttcgtggtcttctccatcctgggcttcatggctgcagagcagggcgtgcacatctccaaggtggcagagtcagggccgggcctggccttcatcgcctacccgcgggctgtcacgctgatgccagtggccccactctgggctgccctgttcttcttcatgctgttgctgcttggtctcgacagccaggtttgcatggggctctgggacagggagccaggaggggggcggagggagggctgcaggcaaggaaaggggtggagggcggtgcggggctcggcctgagctgccctggccacagtttgtaggtgtggagggcttcatcaccggcctcctcgacctcctcccggcctcctactacttccgtttccaaagggagatctctgtggccctctgttgtgccctctgctttgtcatcgatctctccatggtgactgatgtgagtggggtggggggtctgcctgtgacctctggtggccgtctgccatcctccctgactgggctctgtcccccagggcgggatgtacgtcttccagctgtttgactactactcggccagcggcaccaccctgctctggcaggccttttgggagtgcgtggtggtggcctgggtgtacggtaggtcatggctgagggctgggctgggggatggtggcggggaaggcaggtctccagcttggccctcccgcctcacctcgccgcaggagctgaccgcttcatggacgacattgcctgtatgatcgggtaccgaccttgcccctggatgaaatggtgctggtccttcttcaccccgctggtctgcatgggcatcttcatcttcaacgttgtgtactacgagccgctggtctacaacaacacctacgtgtacccgtggtggggtgaggccatgggctgggccttcgccctgtcctccatgctgtgcgtgccgctgcacctcctgggctgcctcctcagggccaagggcaccatggctgagcgctggcagcacctgacccagcccatctggggcctccaccacttggagtaccgagctcaggacgcagatgtcaggggcctgaccaccctgaccccagtgtccgagagcagcaaggtcgtcgtggtggagagtgtcatgtgacaactcagctcacatcaccagctcacctctggtagccatagcagcccctgcttcagccccaccgcacccctccagggggcctgcctttccctgacacttttggggtctgcctgggggaggaggggagaaagcaccatgagtgctcactaaaacaactttttccatttttaataaaacgccaaaaatatcacaacccaccaaaaatagatgcctctccccctccagccctagccgagctggtcctaggccccgcctagtgccccacccccacccacagtgctgcactcctcctgcccctgccacgcccaccccctgcccacctctccaggctctgctctgcagcacacccgtgggtgacccctcaccccagaagcagcagtggcagcttgggaaatgtgaggaagggaaggagggagagacgggagggaggagagagaggagaagggaggcaggggaggggcagcagaaccaaggcaaatatttcagctgggctatacccctctccccatccctgttatagaagcttagagagccagccagcaatggaaccttctggttcctgcgccaatcgccaccagtatcaattgtgtgagcttgggtgcgagtgcacgcgtgcgtgagtacggagagtatatatagatctctatctcttagcaaaggtgaatgccagatgtaaatggcgcctctgggcaaaggaggcttgtattttgcacattttataaaaacttgagagaatgagatttctgcttgtatatttctaaaaagaggaaggagcccaaaccatcctctccttaccactcccatccctgtgagccctaccttacccctctgcccctagccaaggagtgtgaatttatagatctaactttcataggcaaaacaaaagcttcgagctgttgcgtgtgtgagtctgttgtgtggatgtgcgtgtgtggtccccagccccagactggattggaaaagtgcatggtgggggcctcggggctgtccccacgctgtccctttgccacaagtctgtggggcaagaggctgcaatattccgtcctgggtgtctgggctgctaacctggcctgctcaggcttcccaccctgtgcggggcacacccccaggaagggaccctggacacggctcccacgtccaggcttaaggtggatgcacttcccgcacctccagtcttctgtgtagcagctttaacccacgtttgtctgtcacgtccagtcccgagacggctgagtgaccccaagaaaggcttccccgacacccagacagaggctgcagggctggggctgggtgagggtggcgggcctgcggggacattctactgtgctaaaaagccactgcagacatagcaataaaaacatgtcattttccaaagcagg

SEQ ID NO: 12884 - protein, 163 aa, Homo sapiens; identical to SEQ ID NO: 12882

SEQ ID NO: 12885 - DNA, 1157 bp, Homo sapiens
acccagcccatctggggcctccaccacttggagtaccgagctcaggacgcagatgtcaggggcctgaccaccctgaccccagtgtccgagagcagcaaggtcgtcgtggtggagagtgtcatgtgacaactcagctcacatcaccagctcacctctgtggcagcttgggaaatgtgaggaagggaaggagggagagacgggagggaggagagagaggagaagggaggcaggggaggggcagcagaaccaaggcaaatatttcagctgggctatacccctctccccatccctgttatagaagcttagagagccagccagcaatggaaccttctggttcctgcgccaatcgccaccagtatcaattgtgtgagcttgggtgcgagtgcacgcgtgcgtgagtacggagagtatatatagatctctatctcttagcaaaggtgaatgccagatgtaaatggcgcctctgggcaaaggaggcttgtattttgcacattttataaaaacttgagagaatgagatttctgcttgtatatttctaaaaagaggaaggagcccaaaccatcctctccttaccactcccatccctgtgagccctaccttacccctctgcccctagccaaggagtgtgaatttatagatctaactttcataggcaaaacaaaagcttcgagctgttgcgtgtgtgagtctgttgtgtggatgtgcgtgtgtggtccccagccccagactggattggaaaagtgcatggtgggggcctcggggctgtccccacgctgtccctttgccacaagtctgtggggcaagaggctgcaatattccgtcctgggtgtctgggctgctaacctggcctgctcaggcttcccaccctgtgcggggcacacccccaggaagggaccctggacacggctcccacgtccaggcttaaggtggatgcacttcccgcacctccagtcttctgtgtagcagctttaacccacgtttgtctgtcacgtccagtcccgagacggctgagtgaccccaagaaaggcttccccgacacccagacagaggctgcagggctggggctgggtgagggtggcgggcctgcggggacattctactgtgctaaaaagccactgcagacatagcaataaaaacatgtcattttccaaagcagg

SEQ ID NO: 12886 - protein, 87 aa, Homo sapiens
MCVCGPQPQTGLEKCMVGASGLSPRCPFATSLWGKRLQYSVLGVWAANLACSGFPPCAGHTPRKGPWTRLPRPGLRWMHFPHLQSSV

SEQ ID NO: 12887 - DNA, 1320 bp, Homo sapiens
aagccttgcacgcacgctcgagggctggctgaaaacagaccaatagcaccctgcgcctccaaccccaatgcagccatgcttagccggcaggccagtgaggctaagtggtttgaatggggctcaggaggaaccaggctgcagttggtgggcctcgattgccctgcactagagcagtgcatgctggggctttcccgtccagagtgtggcacggtagccccagcatgcctgggggctgagaatgaggggagtgtgggagtggcgttcaggaggggagtgggcggctcccaagcggcctgcctgtctttggtctcccacgcatagacttaagtctggggcgttttcccccaataccacaggcctcgcctgctgctgctgtgtgcaaggcgtggttgtcattgggtctcgcttgcaggctgggatcttgctccctgtctcccactctcagcctccctggaggttacccttgccgagagccactagagttcctctccattaaagggactgggggatggcctctgtgtttcttttgctttatcttgagcttttttgtcagccctttccctctactttgggggcctgcaaaagcagaggggctttattttgagaagtagcctcctgtataacctcgtttgagatagatttgggccagtttctggtgtctgtagcagtcgggttttttccccctaattcctgtcttttcgtttctgttttcttggtcatttacatcatttcaagaactagagaaagctgaaaaccaggttctggccatgcggaagcagtctgagggcctcaccaaggagtacgaccgcttgctggaggagcacgcaaagctgcaggctgcagtagatggtcccatggacaagaaggaagagtaagggcctccttcctcccctgcctgcagctggcttccacctggcacgtgcctgctgcttcctgagagcccggcctctccctccagtacttctgtttgtgcccttctgcttcccccattcccttccacagctcatagctcgtcatctcggcccttgtccacactctccaagcacattacaggggacctgattgctacacgttcagaatgcgtttgctgtcatcctgcttggcctggccaggcctggcacagccttggcttccacgcctgagcgtggagagcacgagttagttgtagtccggcttgcggtggggctgacttcctgttggtttgagcccctttttgttttgccctctgggtgttttctttggtcccgcaggagggtgggtggagcaggtggactggagtttctcttgagggcaataaaagttgtcatggtgtgtacgtgg

SEQ ID NO: 12888 - protein, 35 aa, Homo sapiens [sequence omitted]

SEQ ID NO: 12889 - DNA, 639 bp, Homo sapiens
gcctgaaggctgacctgcagaagctaaaggacgagctggccagcactaagcaaaaactagagaaagctgaaaaccaggttctggccatgcggaagcagtctgagggcctcaccaaggagtacgaccgcttgctggaggagcacgcaaagctgcaggctgcagtagatggtcccatggacaagaaggaagagtaagggcctccttcctcccctgcctgcagctggcttccacctggcacgtgcctgctgcttcctgagagcccggcctctccctccagtacttctgtttgtgcccttctgcttcccccattcccttccacagctcatagctcgtcatctcggcccttgtccacactctccaagcacattacaggggacctgattgctacacgttcagaatgcgtttgctgtcatcctgcttggcctggccaggcctggcacagccttggcttccacgcctgagcgtggagagcacgagttagttgtagtccggcttgcggtggggctgacttcctgttggtttgagcccctttttgttttgccctctgggtgttttctttggtcccgcaggagggtgggtggagcaggtggactggagtttctcttgagggcaataaaagttgtcatggtgtgtacgtgg

SEQ ID NO: 12890 - protein, 35 aa, Homo sapiens [sequence omitted]

SEQ ID NO: 12891 - DNA, 1200 bp, Homo sapiens
cttctagcaacaggatgagtctgcagtggactgcagttgccaccttcctctatgcggaggtctttgttgtgttgcttctctgcattcccttcatttctcctaaaagatggcagaagattttcaagtcccggctggtggagttgttagtgtcctatggcaacaccttctttgtggttctcattgtcatccttgtgctgttggtcatcgatgccgtgcgcgaaattcggaagtatgatgatgtgacggaaaaggtgaacctccagaacaatcccggggccatggagcacttccacatgaagcttttccgtgcccagaggaatctctacattgctggcttttccttgctgctgtccttcctgcttagacgcctggtgactctcatttcgcagcaggccacgctgctggcctccaatgaagcctttaaaaagcaggcggagagtgctagtgaggcggccaagaagtacatggaggagaatgaccagctcaagaagggagctgctgttgacggaggcaagttggatgtcgggaatgctgaggtgaagttggaggaagagaacaggagcctgaaggctgacctgcagaagctaaaggacgagctggccagcactaagcaaaaactagagaaagctgaaaaccaggttctggccatgcggaagcagtctgagggcctcaccaaggagtacgaccgcttgctggaggagcacgcaaagctgcaggctgcagtagatggtcccatggacaagaaggaagagtaagggcctccttcctcccctgcctgcagctggcttccacctggcacgtgcctgctgcttcctgagagcccggcctctccctccagtacttctgtttgtgcccttctgcttcccccattcccttccacagctcatagctcgtcatctcggcccttgtccacactctccaagcacattacaggggacctgattgctacacgttcagaatgcgtttgctgtcatcctgcttggcctggccaggcctggcacagccttggcttccacgcctgagcgtggagagcacgagttagttgtagtccggcttgcggtggggctgacttcctgttggtttgagcccctttttgttttgccctctgggtgttttctttggtcccgcaggagggtgggtggagcaggtggactggagtttctcttgagggcaataaaagttgtcatggtgtgtacgtgg

SEQ ID NO: 12892 - protein, 246 aa, Homo sapiens; identical to SEQ ID NO: 2223

SEQ ID NO: 12893 - DNA, 1954 bp, Homo sapiens
gactgtgggaaactcggtgagcgggctccgcgcgccgggctgggctccgggaccgcggaggctccccggcccatcgacgagggagagaggcgagcggcgcggggaggcccgggggccggggaatctcggggcccgcagcctacctgcgtgtgagaggcaggggcgaggggaaaccgggcggcgcctctagaagctggtctcgggggcggggcggggggcggtgaagccccacctggaggagcggccgggatgggcctccgggacggtgtgccaggccggggccaagtcggaggcccctcgctctgggtgggcgctggggcccgcgagggctactgtaaggacccctggcttctgaggatactgcgtctagaactttctccgtatggggccttgaggtgcttggtcgagacctgcctttgcgcttggtcccgaatcctgccctctaggagtcgctcttgcgggcctccagcccaccggaggcgaagcggccccgggcggaaggccgctggatcctcgagggaggtgccggtttctctccgcgggcgccgtggggacggtgggaggcgggggcgtcggcagcgcttggactaggtgcggccttgggcctgcctggtagcggggatttgggcccgcagagcgcccgcctctgcggctgagttctgcctggcggggaagggagcgcccgatgggtgccgaggcgtcctcctcttggtgccctggcactgctcttcccgaagaacgcctttcagttaaacgggcgtcggaaatctcgggcttcctggggcagggatcgtcgggagaggccgctctggacgtgttgacacacgtgctggagggggcaggaaacaagctcacatcttcctgtgggaaaccttctagcaacaggatgagtctgcagtggactgcagttgccaccttcctctatgcggaggtctttgttgtgttgcttctctgcattcccttcatttctcctaaaagatggcagaagattttcaagtcccggctggtggagttgttagtgtcctatggcaacaccttctttgtggttctcattgtcatccttgtgctgttggtcatcgatgccgtgcgcgaaattcggaagtatgatgatgtgacggaaaaggtgaacctccagaacaatcccggggccatggagcacttccacatgaagcttttccgtgcccagaggaatctctacattgctggcttttccttgctgctgtccttcctgcttagacgcctggtgactctcatttcgcagcaggccacgctgctggcctccaatgaagcctttaaaaagcaggcggagagtgctagtgaggcggccaagaagtacatggaggagaatgaccagctcaagaagggagctgctgttgacggaggcaagttggatgtcgggaatgctgaggtgaagttggaggaagagaacaggagcctgaaggctgacctgcagaagctaaaggacgagctgctgcagtagatggtcccatggacaagaaggaagagtaagggcctccttcctcccctgcctgcagctggcttccacctggcacgtgcctgctgcttcctgagagcccggcctctccctccagtacttctgtttgtgcccttctgcttcccccattcccttccacagctcatagctcgtcatctcggcccttgtccacactctccaagcacattacaggggacctgattgctacacgttcagaatgcgtttgctgtcatcctgcttggcctggccaggcctggcacagccttggcttccacgcctgagcgtggagagcacgagttagttgtagtccggcttgcggtggggctgacttcctgttggtttgagcccctttttgttttgccctctgggtgttttctttggtcccgcaggagggtgggtggagcaggtggactggagtttctcttgagggcaataaaagttgtcatggtgtgtacgtgg

SEQ ID NO: 12894 - protein, 264 aa, Homo sapiens
MGAEASSSWCPGTALPEERLSVKRASEISGFLGQGSSGEAALDVLTHVLEGAGNKLTSSCGKPSSNRMSLQWTAVATFLYAEVFVVLLLCIPFISPKRWQKIFKSRLVELLVSYGNTFFVVLIVILVLLVIDAVREIRKYDDVTEKVNLQNNPGAMEHFHMKLFRAQRNLYIAGFSLLLSFLLRRLVTLISQQATLLASNEAFKKQAESASEAAKKYMEENDQLKKGAAVDGGKLDVGNAEVKLEEENRSLKADLQKLKDELLQ

SEQ ID NO: 12895 - DNA, 1769 bp, Homo sapiens
gactgtgggaaactcggtgagcgggctccgcgcgccgggctgggctccgggaccgcggaggctccccggcccatcgacgagggagagaggcgagcggcgcggggaggcccgggggccggggaatctcggggcccgcagcctacctgcgtgtgagaggcaggggcgaggggaaaccgggcggcgcctctagaagctggtctcgggggcggggcggggggcggtgaagccccacctggaggagcggccgggatgggcctccgggacggtgtgccaggccggggccaagtcggaggcccctcgctctgggtgggcgctggggcccgcgagggctactgtaaggacccctggcttctgaggatactgcgtctagaactttctccgtatgggtgccgaggcgtcctcctcttggtgccctggcactgctcttcccgaagaacgcctttcagttaaacgggcgtcggaaatctcgggcttcctggggcagggatcgtcgggagaggccgctctggacgtgttgacacacgtgctggagggggcaggaaacaagctcacatcttcctgtgggaaaccttctagcaacaggatgagtctgcagtggactgcagttgccaccttcctctatgcggaggtctttgttgtgttgcttctctgcattcccttcatttctcctaaaagatggcagaagattttcaagtcccggctggtggagttgttagtgtcctatggcaacaccttctttgtggttctcattgtcatccttgtgctgttggtcatcgatgccgtgcgcgaaattcggaagtatgatgatgtgacggaaaaggtgaacctccagaacaatcccggggccatggagcacttccacatgaagcttttccgtgcccagaggaatctctacattgctggcttttccttgctgctgtccttcctgcttagacgcctggtgactctcatttcgcagcaggccacgctgctggcctccaatgaagcctttaaaaagcaggcggagagtgctagtgaggcggccaagaagtacatggaggagaatgaccagctcaagaagggagctgctgttgacggaggcaagttggatgtcgggaatgctgaggtgaagttggaggaagagaacaggagcctgaaggctgacctgcagaagctaaaggacgagctggccagcactaagcaaaaactagagaaagctgaaaaccaggttctggccatgcggaagcagtctgagggcctcaccaaggagtacgaccgcttgctggaggagcacgcaaagctgcaggctgcagtagatggtcccatggacaagaaggaagagtaagggcctccttcctcccctgcctgcagctggcttccacctggcacgtgcctgctgcttcctgagagcccggcctctccctccagtacttctgtttgtgcccttctgcttcccccattcccttccacagctcatagctcgtcatctcggcccttgtccacactctccaagcacattacaggggacctgattgctacacgttcagaatgcgtttgctgtcatcctgcttggcctggccaggcctggcacagccttggcttccacgcctgagcgtggagagcacgagttagttgtagtccggcttgcggtggggctgacttcctgttggtttgagcccctttttgttttgccctctgggtgttttctttggtcccgcaggagggtgggtggagcaggtggactggagtttctcttgagggcaataaaagttgtcatggtgtgtacgtgg

SEQ ID NO: 12896 - protein, 313 aa, Homo sapiens
MGAEASSSWCPGTALPEERLSVKRASEISGFLGQGSSGEAALDVLTHVLEGAGNKLTSSCGKPSSNRMSLQWTAVATFLYAEVFVVLLLCIPFISPKRWQKIFKSRLVELLVSYGNTFFVVLIVILVLLVIDAVREIRKYDDVTEKVNLQNNPGAMEHFHMKLFRAQRNLYIAGFSLLLSFLLRRLVTLISQQATLLASNEAFKKQAESASEAAKKYMEENDQLKKGAAVDGGKLDVGNAEVKLEEENRSLKADLQKLKDELASTKQKLEKAENQVLAMRKQSEGLTKEYDRLLEEHAKLQAAVDGPMDKKEE

SEQ ID NO: 12897 - DNA, 2072 bp, Homo sapiens
gactgtgggaaactcggtgagcgggctccgcgcgccgggctgggctccgggaccgcggaggctccccggcccatcgacgagggagagaggcgagcggcgcggggaggcccgggggccggggaatctcggggcccgcagcctacctgcgtgtgagaggcaggggcgaggggaaaccgggcggcgcctctagaagctggtctcgggggcggggcggggggcggtgaagccccacctggaggagcggccgggatgggcctccgggacggtgtgccaggccggggccaagtcggaggcccctcgctctgggtgggcgctggggcccgcgagggctactgtaaggacccctggcttctgaggatactgcgtctagaactttctccgtatggggccttgaggtgcttggtcgagacctgcctttgcgcttggtcccgaatcctgccctctaggagtcgctcttgcgggcctccagcccaccggaggcgaagcggccccgggcggaaggccgctggatcctcgagggaggtgccggtttctctccgcgggcgccgtggggacggtgggaggcgggggcgtcggcagcgcttggactaggtgcggccttgggcctgcctggtagcggggatttgggcccgcagagcgcccgcctctgcggctgagttctgcctggcggggaagggagcgcccgatgggtgccgaggcgtcctcctcttggtgccctggcactgctcttcccgaagaacgcctttcagttaaacgggcgtcggaaatctcgggcttcctggggcagggatcgtcgggagaggccgctctggacgtgttgacacacgtgctggagggggcaggaaacaagctcacatcttcctgtgggaaaccttctagcaacaggatgagtctgcagtggactgcagttgccaccttcctctatgcggaggtctttgttgtgttgcttctctgcattcccttcatttctcctaaaagatggcagaagattttcaagtcccggctggtggagttgttagtgtcctatggcaacaccttctttgtggttctcattgtcatccttgtgctgttggtcatcgatgccgtgcgcgaaattcggaagtatgatgatgtgacggaaaaggtgaacctccagaacaatcccggggccatggagcacttccacatgaagcttttccgtgcccagaggaatctctacattgctggcttttccttgctgctgtccttcctgcttagacgcctggtgactctcatttcgcagcaggccacgctgctggcctccaatgaagcctttaaaaagcaggcggagagtgctagtgaggcggccaagaagtacatggaggagaatgaccagctcaagaagggagctgctgttgacggaggcaagttggatgtcgggaatgctgaggtgaagttggaggaagagaacaggagcctgaaggctgacctgcagaagctaaaggacgagctggccagcactaagcaaaaactagagaaagctgaaaaccaggttctggccatgcggaagcagtctgagggcctcaccaaggagtacgaccgcttgctggaggagcacgcaaagctgcaggctgcagtagatggtcccatggacaagaaggaagagtaagggcctccttcctcccctgcctgcagctggcttccacctggcacgtgcctgctgcttcctgagagcccggcctctccctccagtacttctgtttgtgcccttctgcttcccccattcccttccacagctcatagctcgtcatctcggcccttgtccacactctccaagcacattacaggggacctgattgctacacgttcagaatgcgtttgctgtcatcctgcttggcctggccaggcctggcacagccttggcttccacgcctgagcgtggagagcacgagttagttgtagtccggcttgcggtggggctgacttcctgttggtttgagcccctttttgttttgccctctgggtgttttctttggtcccgcaggagggtgggtggagcaggtggactggagtttctcttgagggcaataaaagttgtcatggtgtgtacgtgg

SEQ ID NO: 12898 - protein, 313 aa, Homo sapiens; identical to SEQ ID NO: 12896

SEQ ID NO: 12899 - DNA, 1643 bp, Homo sapiens
accctgttctcgcccctcggcggggcccgcccacacccccacctcccgttctcgcccctcggcggggcccctcccgcaccacagagacgtgggacggccgcgcggactagagaagcggccctcgccggcccgacaaagccccgccccgccccgcccgcgtgctcgctccaccccgccctgctcgcccggagcccgaggcgcctcttcctctcccgctcggagcgccggccctccgctccggggcggggtgggaagcggaggtgggcggagcctccggggcctcgcgagggctggtgggcggtgcccggcgggcgcttccggtttccggccgcggtatgaggggcggggccggggctgctgtgggagagttctgttgctgcggcggggcctgcacgttgactgtgggaaactcggaaacaagctcacatcttcctgtgggaaaccttctagcaacaggatgagtctgcagtggactgcagttgccaccttcctctatgcggaggtctttgttgtgttgcttctctgcattcccttcatttctcctaaaagatggcagaagattttcaagtcccggctggtggagttgttagtgtcctatggcaacaccttctttgtggttctcattgtcatccttgtgctgttggtcatcgatgccgtgcgcgaaattcggaagtatgatgatgtgacggaaaaggtgaacctccagaacaatcccggggccatggagcacttccacatgaagcttttccgtgcccagaggaatctctacattgctggcttttccttgctgctgtccttcctgcttagacgcctggtgactctcatttcgcagcaggccacgctgctggcctccaatgaagcctttaaaaagcaggcggagagtgctagtgaggcggccaagaagtacatggaggagaatgaccagctcaagaagggagctgctgttgacggaggcaagttggatgtcgggaatgctgaggtgaagttggaggaagagaacaggagcctgaaggctgacctgcagaagctaaaggacgagctggccagcactaagcaaaaactagagaaagctgaaaaccaggttctggccatgcggaagcagtctgagggcctcaccaaggagtacgaccgcttgctggaggagcacgcaaagctgcaggctgcagtagatggtcccatggacaagaaggaagagtaagggcctccttcctcccctgcctgcagctggcttccacctggcacgtgcctgctgcttcctgagagcccggcctctccctccagtacttctgtttgtgcccttctgcttcccccattcccttccacagctcatagctcgtcatctcggcccttgtccacactctccaagcacattacaggggacctgattgctacacgttcagaatgcgtttgctgtcatcctgcttggcctggccaggcctggcacagccttggcttccacgcctgagcgtggagagcacgagttagttgtagtccggcttgcggtggggctgacttcctgttggtttgagcccctttttgttttgccctctgggtgttttctttggtcccgcaggagggtgggtggagcaggtggactggagtttctcttgagggcaataaaagttgtcatggtgtgtacgtgg

SEQ ID NO: 12900 - protein, 246 aa, Homo sapiens; identical to SEQ ID NO: 2223

SEQ ID NO: 12901 - DNA, 940 bp, Homo sapiens
cccaccctgttctcgcccctcggcggggcccgcccacacccccacctcccgttctcgcccctcggcggggcccctcccccaccttcctctatgcggaggtctttgttgtgttgcttctctgcattcccttcatttctcctaaaagatggcagaagattttcaagtcccggctggtggagttgttagtgtcctatggcaacaccttctttgtggttctcattgtcatccttgtgctgttggtcatcgatgccgtgcgcgaaattcggaagtatgatgatgtgacggaaaaggtgaacctccagaacaatcccggggccatggagcacttccacatgaagcttttccgtgcccagaggaatctctacattgctggcttttccttgctgctgtccttcctgcttagacgcctggtgactctcatttcgcagcaggccacgctgctggcctccaatgaagcctttaaaaagcaggcggagagtgctagtgaggcggccaagaagtacatggaggagaatgaccagctggcttccacctggcacgtgcctgctgcttcctgagagcccggcctctccctccagtacttctgtttgtgcccttctgcttcccccattcccttccacagctcatagctcgtcatctcggcccttgtccacactctccaagcacattacaggggacctgattgctacacgttcagaatgcgtttgctgtcatcctgcttggcctggccaggcctggcacagccttggcttccacgcctgagcgtggagagcacgagttagttgtagtccggcttgcggtggggctgacttcctgttggtttgagcccctttttgttttgccctctgggtgttttctttggtcccgcaggagggtgggtggagcaggtggactggagtttctcttgagggcaataaaagttgtcatggtgtgtacgtgg

SEQ ID NO: 12902 - protein, 103 aa, Homo sapiens
MKPLKSRRRVLVRRPRSTWRRMTSWLPPGTCLLLPESPASPSSTSVCALLLPPFPSTAHSSSSRPLSTLSKHITGDLIATRSECVCCHPAWPGQAWHSLGFHA

SEQ ID NO: 12903 - DNA, 799 bp, Homo sapiens
accctgttctcgcccctcggcggggcccgcccacacccccacctcccgttctcgcccctcggcggggcccctcccgcaccacagagacgtgggacggccgcgcggactagagaagcggccctcgccggcccgacaaagccccgccccgccccgcccgcgtgctcgctccaccccgccctgctcgcccggagcccgaggcgcctcttcctctcccgctcggagcgccggccctccgctccggggcggggtgggaagcggaggtgggcggagcctccggggcctcgcgagggctggtgggcggtgcccggcgggcgcttccggtttccggccgcggtatgaggggcggggccggggctgctgtgggagagttctgttgctgcggcggggcctgcacgttgactgtgggaaactcggaaacaagctcacatcttcctgtgggaaaccttctagcaacaggatgagtctgcagtggactgcagttgccaccttcctctatgcggaggtctttgttgtgttgcttctctgcattcccttcatttctcctaaaagatggcagaagattttcaagtcccggctggtggagttgttagtgtcctatggcaacaccttctttgtggttctcattgtcatccttgtgctgttggtcatcgatgccgtgcgcgaaattcggaagtatgatgatgtgacggaaaaggtgaacctccagaacaatcccggggccatggagcacttccacatgaaggtgggtggagcaggtggactggagtttctcttgagggcaataaaagttgtcatggtg

SEQ ID NO: 12904 - protein, 113 aa, Homo sapiens
MSLQWTAVATFLYAEVFVVLLLCIPFISPKRWQKIFKSRLVELLVSYGNTFFVVLIVILVLLVIDAVREIRKYDDVTEKVNLQNNPGAMEHFHMKVGGAGGLEFLLRAIKVVM

SEQ ID NO: 12905 - DNA, 1629 bp, Homo sapiens
accctgttctcgcccctcggcggggcccgcccacacccccacctcccgttctcgcccctcggcggggcccctcccgcaccacagagacgtgggacggccgcgcggactagagaagcggccctcgccggcccgacaaagccccgccccgccccgcccgcgtgctcgctccaccccgccctgctcgcccggagcccgaggcgcctcttcctctcccgctcggagcgccggccctccgctccggggcggggtgggaagcggaggtgggcggagcctccggggcctcgcgagggctggtgggcggtgcccggcgggcgcttccggtttccggccgcggtatgaggggcggggccggggctgctgtgggagagttctgttgctgcggcggggcctgcacgttgactgtgggaaactcggaaacaagctcacatcttcctgtgggaaaccttctagcaacaggatgagtctgcagtggactgcagttgccaccttcctctatgcggaggtctttgttgtgttgcttctctgcattcccttcatttctcctaaaagatggcagaagattttcaagtcccggctggtggagttgttagtgtcctatggcaacaccttctttgtggttctcattgtcatccttgtgctgttggtcatcgatgccgtgcgcgaaattcggaagtatgatgatgtgacggaaaaggtgaacctccagaacaatcccggggccatggagcacttccacatgaagcttttccgtgcccagaggaatctctacattgctggcttttccttgctgctgtccttcctgcttagacgcctggtgactctcatttcgcagcaggccacgctgctggcctccaatgaagcctttaaaaagcaggcggagagtgctagtgaggcggccaagaagtacatggaggagaatgaccagctcaagaagggagctgctgttgacggaggcaagttggatgtcgggaatgctgaggtgaagttggaggaagagaacaggagcctgaaggctgacctgcagaagctaaaggacgagctggccagcactaagcaaagtgaggctcgacctcgtgtccttccccgcagggaagtccagaggagcctcctctgcccgctgctgcccattttgtgccaaagtattagtaacaagccttgcacgcacgctcgagggctggctgaaaacagaccaatagcaccctgcgcctccaaccccaatgcagccatgcttagccggcaggccagtgaggctaagtggtttgaatggggctcaggaggaaccaggctgcagttggtgggcctcgattgccctgcactagagcagtgcatgctggggctttcccgtccagagtgtggcacggtagccccagcatgcctgggggctgagaatgaggggagtgtgggagtggcgttcaggaggggagtgggcggctcccaagcggcctgcctgtctttggtctcccacgcatagacttaagtctggggcgttttcccccaataccacaggcctcgcctgctgctgctgtgtgcaaggcgtggttgtcattgggtctcgcttgcaggctgggatcttgctccctgtctcccactctcagcctccctggaggttacccttgccgagagccacta

SEQ ID NO: 12906 - protein, 337 aa, Homo sapiens
MSLQWTAVATFLYAEVFVVLLLCIPFISPKRWQKIFKSRLVELLVSYGNTFFVVLIVILVLLVIDAVREIRKYDDVTEKVNLQNNPGAMEHFHMKLFRAQRNLYIAGFSLLLSFLLRRLVTLISQQATLLASNEAFKKQAESASEAAKKYMEENDQLKKGAAVDGGKLDVGNAEVKLEEENRSLKADLQKLKDELASTKQSEARPRVLPRREVQRSLLCPLLPILCQSISNKPCTHARGLAENRPIAPCASNPNAAMLSRQASEAKWFEWGSGGTRLQLVGLDCPALEQCMLGLSRPECGTVAPACLGAENEGSVGVAFRRGVGGSQAACLSLVSHA

SEQ ID NO: 12907 - DNA, 1373 bp, Homo sapiens
gactgtgggaaactcggtgagcgggctccgcgcgccgggctgggctccgggaccgcggaggctccccggcccatcgacgagggagagaggcgagcggcgcggggaggcccgggggccggggaatctcggggcccgcagcctacctgcgtgtgagaggcaggggcgaggggaaaccgggcggcgcctctagaagctggtctcgggggcggggcggggggcggtgaagccccacctggaggagcggccgggatgggcctccgggacggtgtgccaggccggggccaagtcggaggcccctcgctctgggtgggcgctggggcccgcgagggctactgtaaggacccctggcttctgaggatactgcgtctagaactttctccgtatggggccttgaggtgcttggtcgagacctgcctttgcgcttggtcccgaatcctgccctctaggagtcgctcttgcgggcctccagcccaccggaggcgaagcggccccgggcggaaggccgctggatcctcgagggaggtgccggtttctctccgcgggcgccgtggggacggtgggaggcgggggcgtcggcagcgcttggactaggtgcggccttgggcctgcctggtagcggggatttgggcccgcagagcgcccgcctctgcggctgagttctgcctggcggggaagggagcgcccgatgggtgccgaggcgtcctcctcttggtgccctggcactgctcttcccgaagaacgcctttcagttaaacgggcgtcggaaatctcgggcttcctggggcagggatcgtcgggagaggccgctctggacgtgttgacacacgtgctggagggggcaggaaacaagctcacatcttcctgtgggaaaccttctagcaacaggatgagtctgcagtggactgcagttgccaccttcctctatgcggaggtctttgttgtgttgcttctctgcattcccttcatttctcctaaaagatggcagaagattttcaagtcccggctggtggagttgttagtgtcctatggcaacaccttctttgtggttctcattgtcatccttgtgctgttggtcatcgatgccgtgcgcgaaattcggaagtatgatgatgtgacggaaaaggtgaacctccagaacaatcccggggccatggagcacttccacatgaagcttttccgtgcccagaggaatctctacattgctggcttttccttgctgctgtccttcctgcttagacgcctggtgactctcatttcgcagcaggccacgctgctggcctccaatgaagcctttaaaaagcaggcggagagtgctagtgaggcggccaagaagtacatggaggagaatgaccagctcaagaaggagggtgttg

SEQ ID NO: 12908 - protein, 228 aa, Homo sapiens
MGAEASSSWCPGTALPEERLSVKRASEISGFLGQGSSGEAALDVLTHVLEGAGNKLTSSCGKPSSNRMSLQWTAVATFLYAEVFVVLLLCIPFISPKRWQKIFKSRLVELLVSYGNTFFVVLIVILVLLVIDAVREIRKYDDVTEKVNLQNNPGAMEHFHMKLFRAQRNLYIAGFSLLLSFLLRRLVTLISQQATLLASNEAFKKQAESASEAAKKYMEENDQLKKEG

SEQ ID NO: 12909 - DNA, 638 bp, Homo sapiens
agtgcagggggtcagggtggagagtggcggccccagcctcgcagggtaactgaactggatgttcttggctgcccagcgcttacaagtcccgtaccttttgtgccctgccaggaaacaagctcacatcttcctgtgggaaaccttctagcaacaggatgagtctgcagtggactgcagttgccaccttcctctatgcggaggtctttgttgtgttgcttctctgcattcccttcatttctcctaaaagatggcagaagattttcaagtcccggctggtggagttgttagtgtcctatggcaacaccttctttgtggttctcattgtcatccttgtgctgttggtcatcgatgccgtgcgcgaaattcggaagtatgatgatgtgacggaaaaggtgaacctccagaacaatcccggggccatggagcacttccacatgaagcttttccgtgcccagaggaatctctacattgctggcttttccttgctgctgtccttcctgcttagacgcctggtgactctcatttcgcagcaggccacgctgctggcctccaatgaagcctttaaaaagcaggcggagagtgctagtgaggcggccaagaagtacatggaggagaatgaccagctcaagaaggtgagc

SEQ ID NO: 12910 - protein, 160 aa, Homo sapiens
MSLQWTAVATFLYAEVFVVLLLCIPFISPKRWQKIFKSRLVELLVSYGNTFFVVLIVILVLLVIDAVREIRKYDDVTEKVNLQNNPGAMEHFHMKLFRAQRNLYIAGFSLLLSFLLRRLVTLISQQATLLASNEAFKKQAESASEAAKKYMEENDQLKKV

SEQ ID NO: 12911 - DNA, 861 bp, Homo sapiens
gactgtgggaaactcggtgagcgggctccgcgcgccgggctgggctccgggaccgcggaggctccccggcccatcgacgagggagagaggcgagcggcgcggggaggcccgggggccggggaatctcggggcccgcagcctacctgcgtgtgagaggcaggggcgaggggaaaccgggcggcgcctctagaagctggtctcgggggcggggcggggggcggtgaagccccacctggaggagcggccgggatgggcctccgggacggtgtgccaggccggggccaagtcggaggcccctcgctctgggtgggcgctggggcccgcgagggctactgaaacaagctcacatcttcctgtgggaaaccttctagcaacaggatgagtctgcagtggactgcagttgccaccttcctctatgcggaggtctttgttgtgttgcttctctgcattcccttcatttctcctaaaagatggcagaagattttcaagtcccggctggtggagttgttagtgtcctatggcaacaccttctttgtggttctcattgtcatccttgtgctgttggtcatcgatgccgtgcgcgaaattcggaagtatgatgatgtgacggaaaaggtgaacctccagaacaatcccggggccatggagcacttccacatgaagcttttccgtgcccagaggaatctctacattgctggcttttccttgctgctgtccttcctgcttagacgcctggtgactctcatttcgcagcaggccacgctgctggcctccaatgaagcctttaaaaagcaggcggagagtgctagtgaggcggccaagaagtacatggaggagaatgaccagctcaagaaggtgagc

SEQ ID NO: 12912 - protein, 160 aa, Homo sapiens; identical to SEQ ID NO: 12910

SEQ ID NO: 12913 - DNA, 681 bp, Homo sapiens
acgttgactgtgggaaactcggtgagcgggctccgcgcgccgggctgggctccgggaccgcggaggctccccggcccatcgacgagggagagaggcgagcggcgcggggaggcccgggggccggggaatctcggggcccgcagcctacctgcgtgaaacaagctcacatcttcctgtgggaaaccttctagcaacaggatgagtctgcagtggactgcagttgccaccttcctctatgcggaggtctttgttgtgttgcttctctgcattcccttcatttctcctaaaagatggcagaagattttcaagtcccggctggtggagttgttagtgtcctatggcaacaccttctttgtggttctcattgtcatccttgtgctgttggtcatcgatgccgtgcgcgaaattcggaagtatgatgatgtgacggaaaaggtgaacctccagaacaatcccggggccatggagcacttccacatgaagcttttccgtgcccagaggaatctctacattgctggcttttccttgctgctgtccttcctgcttagacgcctggtgactctcatttcgcagcaggccacgctgctggcctccaatgaagcctttaaaaagcaggcggagagtgctagtgaggcggccaagaagtacatggaggagaatgaccagctcaagaaggtgagc

SEQ ID NO: 12914 - protein, 160 aa, Homo sapiens; identical to SEQ ID NO: 12910

SEQ ID NO: 12915 - DNA, 641 bp, Homo sapiens
gttgctgcggcggggcctgcacgttgactgtgggaaactcggtgagcgggctccgcgcgccgggctgggctccgggaccgcggaggctccccggcccatcgacgagggagagaggaaacaagctcacatcttcctgtgggaaaccttctagcaacaggatgagtctgcagtggactgcagttgccaccttcctctatgcggaggtctttgttgtgttgcttctctgcattcccttcatttctcctaaaagatggcagaagattttcaagtcccggctggtggagttgttagtgtcctatggcaacaccttctttgtggttctcattgtcatccttgtgctgttggtcatcgatgccgtgcgcgaaattcggaagtatgatgatgtgacggaaaaggtgaacctccagaacaatcccggggccatggagcacttccacatgaagcttttccgtgcccagaggaatctctacattgctggcttttccttgctgctgtccttcctgcttagacgcctggtgactctcatttcgcagcaggccacgctgctggcctccaatgaagcctttaaaaagcaggcggagagtgctagtgaggcggccaagaagtacatggaggagaatgaccagctcaagaaggtgagc

SEQ ID NO: 12916 - protein, 160 aa, Homo sapiens; identical to SEQ ID NO: 12910

SEQ ID NO: 12917 - DNA, 940 bp, Homo sapiens
accctgttctcgcccctcggcggggcccgcccacacccccacctcccgttctcgcccctcggcggggcccctcccgcaccacagagacgtgggacggccgcgcggactagagaagcggccctcgccggcccgacaaagccccgccccgccccgcccgcgtgctcgctccaccccgccctgctcgcccggagcccgaggcgcctcttcctctcccgctcggagcgccggccctccgctccggggcggggtgggaagcggaggtgggcggagcctccggggcctcgcgagggctggtgggcggtgcccggcgggcgcttccggtttccggccgcggtatgaggggcggggccggggctgctgtgggagagttctgttgctgcggcggggcctgcacgttgactgtgggaaactcggaaacaagctcacatcttcctgtgggaaaccttctagcaacaggatgagtctgcagtggactgcagttgccaccttcctctatgcggaggtctttgttgtgttgcttctctgcattcccttcatttctcctaaaagatggcagaagattttcaagtcccggctggtggagttgttagtgtcctatggcaacaccttctttgtggttctcattgtcatccttgtgctgttggtcatcgatgccgtgcgcgaaattcggaagtatgatgatgtgacggaaaaggtgaacctccagaacaatcccggggccatggagcacttccacatgaagcttttccgtgcccagaggaatctctacattgctggcttttccttgctgctgtccttcctgcttagacgcctggtgactctcatttcgcagcaggccacgctgctggcctccaatgaagcctttaaaaagcaggcggagagtgctagtgaggcggccaagaagtacatggaggagaatgaccagctcaagaaggtgagc

SEQ ID NO: 12918 - protein, 160 aa, Homo sapiens; identical to SEQ ID NO: 12910

SEQ ID NO: 12919 - DNA, 923 bp, Homo sapiens
accctgttctcgcccctcggcggggcccgcccacacccccacctcccgttctcgcccctcggcggggcccctcccgcaccacagagacgtgggacggccgcgcggactagagaagcggccctcgccggcccgacaaagccccgccccgccccgcccgcgtgctcgctccaccccgccctgctcgcccggagcccgaggcgcctcttcctctcccgctcggagcgccggccctccgctccggggcggggtgggaagcggaggtgggcggagcctccggggcctcgcgagggctggtgggcggtgcccggcgggcgcttccggtttccggccgcggtatgaggggcggggccggggctgctgtgggagagttctgttgctgcggcggggcctgcacgttgactgtgggaaactcggaaacaagctcacatcttcctgtgggaaaccttctagcaacaggatgagtctgcagtggactgcagttgccaccttcctctatgcggaggtctttgttgtgttgcttctctgcattcccttcatttctcctaaaagatggcagaagattttcaagtcccggctggtggagttgttagtgtcctatggcaacaccttctttgtggttctcattgtcatccttgtgctgttggtcatcgatgccgtgcgcgaaattcggaagtatgatgatgtgacggaaaaggtgaacctccagaacaatcccggggccatggagcacttccacatgaagcttttccgtgcccagaggaatctctacattgctggcttttccttgctgctgtccttgtgagtggggggttgagggggcaggtgctgtgaaaggagccatgggctagccatggacaccgagctcagtgggctcagtctcccccctgtgactttgattcctcctcagtctgtggcctggatcc

SEQ ID NO: 12920 - protein, 114 aa, Homo sapiens [sequence omitted]

SEQ ID NO: 12921 - DNA, 409 bp, Homo sapiens
ggccttttttccaatagtcttgaatggatgtcaaattagagaattgcaagccactgaggctgactttgcatgggctattcggccattggagaagagtacaaagctggatttccattttgctcagggccctagagctcgtgtgtgtgctttctcttcaactcctgtcctttttgtcttcttcacagatggcagaagattttcaagtcccggctggtggagttgttagtgtcctatggcaacaccttctttgtggttctcattgtcatccttgtgctgttggtcatcgatgccgtgcgcgaaattcggaagtatgatgatgtgacggaaaaggtgaacctccagaacaatcccggggccatggagcacttccacatgaagcttttccgtgcccagaggaatctctacattg

SEQ ID NO: 12922 - protein, 96 aa, Homo sapiens
MDVKLENCKPLRLTLHGLFGHWRRVQSWISILLRALELVCVLSLQLLSFLSSSQMAEDFQVPAGGVVSVLWQHLLCGSHCHPCAVGHRCRARNSEV

SEQ ID NO: 12923 - DNA, 1200 bp, Homo sapiens
gactgtgggaaactcggtgagcgggctccgcgcgccgggctgggctccgggaccgcggaggctccccggcccatcgacgagggagagaggcgagcggcgcggggaggcccgggggccggggaatctcggggcccgcagcctacctgcgtgtgagaggcaggggcgaggggaaaccgggcggcgcctctagaagctggtctcgggggcggggcggggggcggtgaagccccacctggaggagcggccgggatgggcctccgggacggtgtgccaggccggggccaagtcggaggcccctcgctctgggtgggcgctggggcccgcgagggctactgtaaggacccctggcttctgaggatactgcgtctagaactttctccgtatggggccttgaggtgcttggtcgagacctgcctttgcgcttggtcccgaatcctgccctctaggagtcgctcttgcgggcctccagcccaccggaggcgaagcggccccgggcggaaggccgctggatcctcgagggaggtgccggtttctctccgcgggcgccgtggggacggtgggaggcgggggcgtcggcagcgcttggactaggtgcggccttgggcctgcctggtagcggggatttgggcccgcagagcgcccgcctctgcggctgagttctgcctggcggggaagggagcgcccgatgggtgccgaggcgtcctcctcttggtgccctggcactgctcttcccgaagaacgcctttcagttaaacgggcgtcggaaatctcgggcttcctggggcagggatcgtcgggagaggccgctctggacgtgttgacacacgtgctggagggggcaggaaacaagctcacatcttcctgtgggaaaccttctagcaacaggatgagtctgcagtggactgcagttgccaccttcctctatgcggaggtctttgttgtgttgcttctctgcattcccttcatttctcctaaaagatggcagaagattttcaagtcccggctggtggagttgttagtgtcctatggcaacaccttctttgtggttctcattgtcatccttgtgctgttggtcatcgatgccgtgcgcgaaattcggaagtatgatgatgtgacggaaaaggtgaacctccagaacaatcccggggccatggagcacttccacatgaagcttttccgtgcccagaggaatctctacat

SEQ ID NO: 12924 - protein, 170 aa, Homo sapiens
MGAEASSSWCPGTALPEERLSVKRASEISGFLGQGSSGEAALDVLTHVLEGAGNKLTSSCGKPSSNRMSLQWTAVATFLYAEVFVVLLLCIPFISPKRWQKIFKSRLVELLVSYGNTFFVVLIVILVLLVIDAVREIRKYDDVTEKVNLQNNPGAMEHFHMKLFRAQRNL

SEQ ID NO: 12925 - DNA, 692 bp, Homo sapiens
gactgtgggaaactcggtgagcgggctccgcgcgccgggctgggctccgggaccgcggaggctccccggcccatcgacgagggagagaggcgagcggcgcggggaggcccgggggccggggaatctcggggcccgcagcctacctgcgtgtgagaggcaggggcgaggggaaaccgggcggcgcctctagaagctggtctcgggggcggggcggggggcggtgaagccccacctggaggagcggccgggatgggcctccgggacggtgtgccaggccggggccaagtcggaggcccctcgctctgggtgggcgctggggcccgcgagggctactgaaacaagctcacatcttcctgtgggaaaccttctagcaacaggatgagtctgcagtggactgcagttgccaccttcctctatgcggaggtctttgttgtgttgcttctctgcattcccttcatttctcctaaaagatggcagaagattttcaagtcccggctggtggagttgttagtgtcctatggcaacaccttctttgtggttctcattgtcatccttgtgctgttggtcatcgatgccgtgcgcgaaattcggaagtatgatgatgtgacggaaaaggtgaacctccagaacaatcccggggccatggagcacttccacatgaagcttttccgtgcccagaggaatctctacat

SEQ ID NO: 12926 - protein, 103 aa, Homo sapiens
MSLQWTAVATFLYAEVFVVLLLCIPFISPKRWQKIFKSRLVELLVSYGNTFFVVLIVILVLLVIDAVREIRKYDDVTEKVNLQNNPGAMEHFHMKLFRAQRNL

SEQ ID NO: 12927 - DNA, 880 bp, Homo sapiens
gactgtgggaaactcggtgagcgggctccgcgcgccgggctgggctccgggaccgcggaggctccccggcccatcgacgagggagagaggcgagcggcgcggggaggcccgggggccggggaatctcggggcccgcagcctacctgcgtgtgagaggcaggggcgaggggaaaccgggcggcgcctctagaagctggtctcgggggcggggcggggggcggtgaagccccacctggaggagcggccgggatgggcctccgggacggtgtgccaggccggggccaagtcggaggcccctcgctctgggtgggcgctggggcccgcgagggctactgtaaggacccctggcttctgaggatactgcgtctagaactttctccgtatggggccttgaggtgcttggtcgagacctgcctttgcgcttggtcccgaatcctgccctctaggagtcgctcttgcgggcctccagcccaccggaggcgaagcggccccgggcggaaggccgctggatcctcgagggaggaaacaagctcacatcttcctgtgggaaaccttctagcaacaggatgagtctgcagtggactgcagttgccaccttcctctatgcggaggtctttgttgtgttgcttctctgcattcccttcatttctcctaaaagatggcagaagattttcaagtcccggctggtggagttgttagtgtcctatggcaacaccttctttgtggttctcattgtcatccttgtgctgttggtcatcgatgccgtgcgcgaaattcggaagtatgatgatgtgacggaaaaggtgaacctccagaacaatcccggggccatggagcacttccacatgaagcttttccgtgcccagaggaatctctacat

SEQ ID NO: 12928 - protein, 106 aa, Homo sapiens
MGLRDGVPGRGQVGGPSLWVGAGAREGYCKDPWLLRILRLELSPYGALRCLVETCLCAWSRILPSRSRSCGPPAHRRRSGPGRKAAGSSREETSSHLPVGNLLATG

SEQ ID NO: 12929 - DNA, 3664 bp, Homo sapiens
gccaggctgcggagcggacggacgcgcctggtgccccggggaggggcgccaccgggggaggaggaggaggagaaggtggagaggaagagacgccccctctgcccgagacctctcaaggccctgacctcaggggccagggcactgacaggacaggagagccaagttcctccacttgggctgcccgaagaggccgcgaccctggagggccctgagcccaccgcaccaggggccccagcaccaccccgggggcctaaagcgacagtctcaggggccatcgcaaggtttccagttgcctagacaacaggcccagggtcagagcaacaatccttccagccacctgcctcaactgctgccccaggcaccagccccagtccctacgcggcagccagcccaggtgacatgccggtgctctccaggccccggccctggcgggggaacacgctgaagcgcacggccgtgctcctggccctcgcggcctatggagcccacaaagtctaccccttggtgcgccagtgcctggccccggccaggggtcttcaggcgcccgccggggagcccacgcaggaggcctccggggtcgcggcggccaaagctggcatgaaccgggtattcctgcagcggctcctgtggctcctgcggctgctgttcccccgggtcctgtgccgggagacggggctgctggccctgcactcggccgccttggtgagccgcaccttcctgtcggtgtatgtggcccgcctggacggaaggctggcccgctgcatcgtccgcaaggacccgcgggcttttggctggcagctgctgcagtggctcctcatcgccctccctgctaccttcgtcaacagtgccatccgttacctggagggccaactggccctgtcgttccgcagccgtctggtggcccacgcctaccgcctctacttctcccagcagacctactaccgggtcagcaacatggacgggcggcttcgcaaccctgaccagtctctgacggaggacgtggtggcctttgcggcctctgtggcccacctctactccaacctgaccaagccactcctggacgtggctgtgacttcctacaccctgcttcgggcggcccgctcccgtggagccggcacagcctggccctcggccatcgccggcctcgtggtgttcctcacggccaacgtgctgcgggccttctcgcccaagttcggggagctggtggcagaggaggcgcggcggaagggggagctgcgctacatgcactcgcgtgtggtggccaactcggaggagatcgccttctatgggggccatgaggtggagctggccctgctacagcgctcctaccaggacctggcctcgcagatcaacctcatccttctggaacgcctgtggtatgttatgctggagcagttcctcatgaagtatgtgtggagcgcctcgggcctgctcatggtggctgtccccatcatcactgccactggctactcagagtcagatgcagaggccgtgaagaaggcagccttggaaaagaaggaggaggagctggtgagcgagcgcacagaagccttcactattgcccgcaacctcctgacagcggctgcagatgccattgagcggatcatgtcgtcgtacaaggaggtgacggagctggctggctacacagcccgggtgcacgagatgttccaggtatttgaagatgttcagcgctgtcacttcaagaggcccagggagctagaggacgctcaggcggggtctgggaccataggccggtctggtgtccgtgtggagggccccctgaagatccgaggccaggtggtggatgtggaacaggggatcatctgcgagaacatccccatcgtcacgccctcaggagaggtggtggtggccagcctcaacatcagggtggaggaaggcatgcatctgctcatcacaggccccaatggctgcggcaagagctccctgttccggatcctgggtgggctctggcccacgtacggtggtgtgctctacaagcccccaccccagcgcatgttctacatcccgcagaggccctacatgtctgtgggctccctgcgtgaccaggtgatctacccggactcagtggaggacatgcaaaggaagggctactcggagcaggacctggaagccatcctggacgtcgtgcacctgcaccacatcctgcagcgggagggaggttgggaggctatgtgtgactggaaggacgtcctgtcgggtggcgagaagcagagaatcggcatggcccgcatgttctaccacaggcccaagtacgccctcctggatgaatgcaccagcgccgtgagcatcgacgtggaaggcaagatcttccaggcggccaaggacgcgggcattgccctgctctccatcacccaccggccctccctgtggaaataccacacacacttgctacagttcgatggggagggcggctggaagttcgagaagctggactcagctgcccgcctgagcctgacggaggagaagcagcggctggagcagcagctggcgggcattcccaagatgcagcggcgcctccaggagctctgccagatcctgggcgaggccgtggccccagcgcatgtgccggcacctagcccgcaaggccctggtggcctccagggtgcctccacctgacacaaccgtccccggcccctgccccgcccccaagctcggatcacatgaaggagacagcagcacccacccatgcacgcaccccgcccctgcatgcctggcccctcctcctagaaaacccttcccgccctcgggaaagtagatgtggagggtggcgccctgcgtaaccctcgccctgtccctcccactccctgggggcgctgttccacagtgactgggccctgtccagggcagtgagtcctctactttgctccgtggaggaagctggggtacaaggggcccagtgctggccacacagcagcgcagccgagccccaggagcccgtcaggccacagcccctggcactgcaggtggcctccctccagagactcgagtccccatgattccctcctcgtcagtctctcaaagaccccatggtccatcccctgagggtggtcagccaaggctcccgttccgtgggatgccataaaagccgcccagtgggacccacagtcacacagagcgcctcacctgcatcctctcccccacaagagccccaaagatcccacgggagaggggagagggacgcacagcactgcctgccaagcgagaatgcaggccccgccccctcggcccctcaccacctctttctacagcctaatttattggattccctattcgtagccatctccgtggccaatgtgactaccgtgccagcagcgggggcggcccagcctctgagtcccgtggggccccggctcccaccggtgccaaacccagcccctgcggccgtcaccccgccagcctacactgccagccgccaccggggcacacgggcctctgcttgccagccaggagtgcggacaccatgttcccagctcagtgccaaagaggggtcaccagggggagctgtctgcggagccagcgcctgcccgagagagaccccaccgccaccgtgtgcctttcccgggccctcagccctcgggccgggcaccacccccagtccccccagtaaaagcctccactggcaaatgcagtccttcctccctgc

SEQ ID NO: 12930 - protein, 745 aa, Homo sapiens [sequence omitted]

SEQ ID NO: 12931 - DNA, 1955 bp, Homo sapiens
cggagcggacggacgcgcctggtgccccggggaggggcgccaccgggggaggaggaggaggagaaggtggagaggaagagacgccccctctgcccgagacctctcaaggccctgacctcaggggccagggcactgacaggacaggagagccaagttcctccacttgggctgcccgaagaggccgcgaccctggagggccctgagcccaccgcaccaggggccccagcaccaccccgggggcctaaagcgacagtctcaggggccatcgcaaggtttccagttgcctagacaacaggcccagggtcagagcaacaatccttccagccacctgcctcaactgctgccccaggcaccagccccagtccctacgcggcagccagcccaggtgacatgccggtgctctccaggccccggccctggcgggggaacacgctgaagcgcacggccgtgctcctggccctcgcggcctatggagcccacaaagtctaccccttggtgcgccagtgcctggccccggccaggggtcttcaggcgcccgccggggagcccacgcaggaggcctccggggtcgcggcggccaaagctggcatgaaccgggtattcctgcagcggctcctgtggctcctgcggctgctgttcccccgggtcctgtgccgggagacggggctgctggccctgcactcggccgccttggtgagccgcaccttcctgtcggtgtatgtggcccgcctggacggaaggctggcccgctgcatcgtccgcaaggacccgcgggcttttggctggcagctgctgcagtggctcctcatcgccctccctgctaccttcgtcaacagtgccatccgttacctggagggccaactggccctgtcgttccgcagccgtctggtggcccacgcctaccgcctctacttctcccagcagacctactaccgggtcagcaacatggacgggcggcttcgcaaccctgaccagtctctgacggaggacgtggtggcctttgcggcctctgtggcccacctctactccaacctgaccaagccactcctggacgtggctgtgacttcctacaccctgcttcgggcggcccgctcccgtggagccggcacagcctggccctcggccatcgccggcctcgtggtgttcctcacggccaacgtgctgcgggccttctcgcccaagttcggggagctggtggcagaggaggcgcggcggaagggggagctgcgctacatgcactcgcgtgtggtggccaactcggaggagatcgccttctatgggggccatgaggtggagctggccctgctacagcgctcctaccaggacctggcctcgcagatcaacctcatccttctggaacgcctgtggtatgttatgctggagcagttcctcatgaagtatgtgtggagcgcctcgggcctgctcatggtggctgtccccatcatcactgccactggctactcagagtcaggtgagacccagggctccaagaggatccaggccaggggcctgtcccccataccgctgggtgctgagctcacgagggcccaactcagccagcccgccgcccacttctgctgccggggccaccgaggccctgctgccagccttgatgctttcagaggttgagctcgccttgcccctccttgttgccttttgccctgcgcgcacctcacgccctttgttaccactcagacaagcccaggactgcaagtcaggaacactacatgtcacttctccaggcacagataccctcacccacctgtccctgtcctcaacccaactgcgacttagaggtgggagaatgtgcggagtacctggagtgagccccttcatcactccagccttggtttcctcgccctgaaacagctcttgcaccctaaggtgttttagaggagtgggaagcctgttctacctgttattttagtgataagattaaatgtttaggtttctgc

SEQ ID NO: 12932 - protein, 412 aa, Homo sapiens [sequence omitted]

SEQ ID NO: 12933 - DNA, 970 bp, Homo sapiens
ggacaggagagccaagttcctccacttgggctgcccgaagaggccgcgaccctggagggccctgagcccaccgcaccaggggccccagcaccaccccgggggcctaaagcgacagtctcaggggccatcgcaaggtttccagttgcctagacaacaggcccagggtcagagcaacaatccttccagccacctgcctcaactgctggcccgctgcatcgtccgcaaggacccgcgggcttttggctggcagctgctgcagtggctcctcatcgccctccctgctaccttcgtcaacagtgccatccgttacctggagggccaactggccctgtcgttccgcagccgtctggtggcccacgcctaccgcctctacttctcccagcagacctactaccgggtcagcaacatggacgggcggcttcgcaaccctgaccagtctctgacggaggacgtggtggcctttgcggcctctgtggcccacctctactccaacctgaccaagccactcctggacgtggctgtgacttcctacaccctgcttcgggcggcccgctcccgtggagccggcacagcctggccctcggccatcgccggcctcgtggtgttcctcacggccaacgtgctgcgggccttctcgcccaagttcggggagctggtggcagaggaggcgcggcggaagggggagctgcgctacatgcactcgcgtgtggtggccaactcggaggagatcgccttctatgggggccatgaggtggggcaggttggggtgccgggcacggagggaagcgtgtggcagggaggcccgggggcaggcagccgtgagcggtggggacagtctggggcgggccggggctgatgccaaaggtgtgggcaggccatgggagagccgggctggggtgggcagggcctttgggcagccgtggactcaggcgcggcagtggagaggcaggaaggctgggtggggactgtc

SEQ ID NO: 12934 - protein, 149 aa, Homo sapiens
MDGRLRNPDQSLTEDVVAFAASVAHLYSNLTKPLLDVAVTSYTLLRAARSRGAGTAWPSAIAGLVVFLTANVLRAFSPKFGELVAEEARRKGELRYMHSRVVANSEEIAFYGGHEVGQVGVPGTEGSVWQGGPGAGSRERWGQSGAGRG

SEQ ID NO: 12935 - DNA, 911 bp, Homo sapiens
ggaaggctggcggaagctgtgtcacagcgcgcccctgcgcccaccacccagacaagagagatctaagtcagaaaggggagacggagacacggacacacccagagggagagcgccgtgtggagacagaggctgaggccgacctgccgtggcagaagccagggaagcccgcagatgggcagcagagcagaagctgggacagaggccccgagcggaggcaccttctcggtccttggcagaagcccgccctgcctgcgccttcctctcggactgctattccccgagccgggagagaggccatctctgctgggaaagccactcaaagtttgtaacgctttgtgaccgcagccacaggatgctaatgaagccacctgactgtcccctcctgaagggtggggcctgggccttgccccatctcgcatacccggctccctgagcatatgtggccctgcgcgcaggggccccatgagcttgcccgctgcccctgcctgcttgtgctgcccggggccagcctggaaaccaccttccttggactcactggtgatcagctcccccgacatcctaggaggggccgctgcgagcggagagggacccctcacaccatacagacaaaccaacccagagcacatcacaggctgatgtgtagtgtggcccaaagtatgaaactctcagaagaaaatgggataaaacttcacgaccttggatatggcaatagttccttcactaggacaccaaaagcatgagcaacaagagaaaaacagatcaactgaacctcattcaactcaacacttttgtgcaccaaaggacaatatcgagacagtgaaaaagacaacctacagactgggagaaaactctggactggtgaaccacacatctgatgagggtgcagtatccagaatatacaaagagctttt

SEQ ID NO: 12936 - protein, 100 aa, Homo sapiens
MWPCAQGPHELARCPCLLVLPGASLETTFLGLTGDQLPRHPRRGRCERRGTPHTIQTNQPRAHHRLMCSVAQSMKLSEENGIKLHDLGYGNSSFTRTPKA

SEQ ID NO: 12937 - DNA, 2069 bp, Homo sapiens
tggagggtttcctgcagagaggtgctggtccgcccgccttccttcccagacagtagctgccggccaccgtactgactcgccctttgagggcctcagcctggattattcattcaaaacaagggggatgtggtcccctcacccatgcaggacagcaagagaaagttccagtcagtgtgccagctgctggctgccacgggaggcaggtggtggatgtggaacaggggatcatctgcgagaacatccccatcgtcacgccctcaggagaggtggtggtggccagcctcaacatcagggtggaggaaggcatgcatctgctcatcacaggccccaatggctgcggcaagagctccctgttccggatcctgggtgggctctggcccacgtacggtggtgtgctctacaagcccccaccccagcgcatgttctacatcccgcagaggccctacatgtctgtgggctccctgcgtgaccaggtgatctacccggactcagtggaggacatgcaaaggaagggctactcggagcaggacctggaagccatcctggacgtcgtgcacctgcaccacatcctgcagcgggagggaggttgggaggctatgtgtgactggaaggacgtcctgtcgggtggcgagaagcagagaatcggcatggcccgcatgttctaccacaggcccaagtacgccctcctggatgaatgcaccagcgccgtgagcatcgacgtggaaggcaagatcttccaggcggccaaggacgcgggcattgccctgctctccatcacccaccggccctccctgtggaaataccacacacacttgctacagttcgatggggagggcggctggaagttcgagaagctggactcagctgcccgcctgagcctgacggaggagaagcagcggctggagcagcagctggcgggcattcccaagatgcagcggcgcctccaggagctctgccagatcctgggcgaggccgtggccccagcgcatgtgccggcacctagcccgcaaggccctggtggcctccagggtgcctccacctgacacaaccgtccccggcccctgccccgcccccaagctcggatcacatgaaggagacagcagcacccacccatgcacgcaccccgcccctgcatgcctggcccctcctcctagaaaacccttcccgccctcgggaaagtagatgtggagggtggcgccctgcgtaaccctcgccctgtccctcccactccctgggggcgctgttccacagtgactgggccctgtccagggcagtgagtcctctactttgctccgtggaggaagctggggtacaaggggcccagtgctggccacacagcagcgcagccgagccccaggagcccgtcaggccacagcccctggcactgcaggtggcctccctccagagactcgagtccccatgattccctcctcgtcagtctctcaaagaccccatggtccatcccctgagggtggtcagccaaggctcccgttccgtgggatgccataaaagccgcccagtgggacccacagtcacacagagcgcctcacctgcatcctctcccccacaagagccccaaagatcccacgggagaggggagagggacgcacagcactgcctgccaagcgagaatgcaggccccgccccctcggcccctcaccacctctttctacagcctaatttattggattccctattcgtagccatctccgtggccaatgtgactaccgtgccagcagcgggggcggcccagcctctgagtcccgtggggccccggctcccaccggtgccaaacccagcccctgcggccgtcaccccgccagcctacactgccagccgccaccggggcacacgggcctctgcttgccagccaggagtgcggacaccatgttcccagctcagtgccaaagaggggtcaccagggggagctgtctgcggagccagcgcctgcccgagagagaccccaccgccaccgtgtgcctttcccgggccctcagccctcgggccgggcaccacccccagtccccccagtaaaagcctccactggcaaatgcagtccttcctccctg

SEQ ID NO: 12938 - protein, 245 aa, Homo sapiens [sequence omitted]

SEQ ID NO: 12939 - DNA, 725 bp, Homo sapiens
acacacacacatgtccttgctggccccggatgagacagacgcctgcaatctggcatggggaatgggtttctccttcctttccacagaagaaaataaatcaggctgggcgtcgtggctcccgcctgtaatcccagcactttgggagcctaaggcagcaggatcacttgggcccaggagctggtctcaaactcctggactcaagcggccctcccgccttggcttcccaaagtgctggcccgtgagcctgtgagccactgcgcctggctaccttcttttgaattcccattcagactgtgtgttgctggtacatagaaaaacaatggatttctatgtatcaagtaaccttgtaaactctcatattaagtctaataattatgtttgggttctctttgtggattctttttgattttctgcgtacacaatcctatcatctgcaagtaatgaccattttgtttcttctattccagtctttttagctttgatttctttttttgaggcagagtctggctctgtcacccaggctggagtatagtggcacaatcttggctcactgcaacctccgcctccctggttcaagcagttctcctgcctcagcctcccaagaagctgggactacaggcacccaccaccacgcctgactaatttttgtatctttaccagacacagggtttcaccatgttggccaggctgatctggaactcctgatccacctgccttggcctccc

SEQ ID NO: 12940 - protein, 79 aa, Homo sapiens
MSLLAPDETDACNLAWGMGFSFLSTEENKSGWASWLPPVIPALWEPKAAGSLGPRSWSQTPGLKRPSRLGFPKCWPVSL

SEQ ID NO: 12941 - DNA, 6211 bp, Homo sapiens
gatgagtcggactgggcacgattgcattgtggggagggaggctggggctctgtgagacgtgctcctggcaccgccagctgctacttggccctcgccggtggcccaccaggacaatgcccccccgcagccatctcatgcccatcgccactgccctggggcagctgaactgagcgtatgtgccacgccgcccaggagacccctctgctgcaccacttcatggcccccgtgatggctcgctggcctcccttcggcctctgcctcctcctgctgctgctgtccccaccgccactgcccttgacaggggcccatcgcttctccgcacctaataccactctcaaccacttggcactggcacctggccgaggcacactctatgtcggcgcagtgaaccgcctcttccagctcagccccgagctgcagctcgaggccgtggctgtcactggccctgtaatcgacagccctgactgcgtgcccttccgtgacccagccgagtgcccacaggcccagctcactgacaatgccaaccagctgctgctggtgagcagccgcgcccaggagctggtggcctgcgggcaggtgcggcagggcgtgtgtgagacacggcgccttggggatgtggccgaggtgctgtaccaggctgaggaccctggtgacgggcagtttgtggctgccaataccccgggagtggcaacggtggggctggtggtgcccttgcccggccgggacctcctgcttgtggccagaggcctggcgggcaagctgtcggcaggggtgccacccctggccatccgccagctggccgggtctcagcccttctccagcgagggcctgggccgcctggtggtgggcgacttctccgactacaacaacagctacgtcggggcctttgccgacgcccgctccgcctacttcgtgttccgccgccgcggggcccgggcccaggctgagtaccgctcctacgtggcccgcgtctgcctgggggacaccaacctgtactcctacgtggaggtccccctcgcctgccagggccagggcctcatccaggccgccttccttgccccgggcaccttgctaggggtgtttgccgcgggcccaaggggcacccaggcggcgctctgtgccttccccatggtggagctgggtgccagcatggagcaggcccggagactctgctacacggcgggcggccggggccccagcggcgcagaggaagccaccgtggagtacggcgtcacgtcgcgctgcgtcaccctgccccttgattcccccgagtcgtacccctgtggcgacgagcacacccccagccccattgctggccgccagcccctggaggtccagcctctgctgaagctcgggcagccggtcagcgccgtggcagctctccaggcagatgggcacatgatagccttcctgggggacacccagggccagctgtacaaggtctttctccacggctcccagggccaggtttaccactcccagcaagtggggcctccaggctcagccatcagcccagacctgctgctggacagcagtggcagtcacctctatgtcctgactgcccaccaggtggaccggatacctgtggcagcctgcccccagttccctgactgtgccagctgcctccaggcccaggacccgctgtgtggctggtgtgtcctccagggcaggtgtacccggaagggccagtgcgggcgggcaggccagctgaaccagtggctgtggagttatgaggaggacagccactgcctgcacatccagagcctgctgccgggccaccacccccgccaggagcagggccaggtcactttgtctgtcccccggctgcccatcctggatgcagatgaatacttccattgtgcgttcggggactatgacagcttggctcatgtggaagggccccacgtggcctgtgtcacccctccccaagaccaggtgccacttaaccctccaggcacagaccacgtcactgtgcccctggccctgatgttcgaggacgtgactgtggctgccaccaacttctccttttatgactgcagtgccgtccaggccttggaggcggctgccccgtgtcgcgcttgcgtgggcagcatctggcggtgtcactggtgcccgcagagtagccactgcgtgtacggagagcactgcccagagggcgagaggaccatctacagcgcccaggaggtggacatccaggtgcgtggcccaggggcttgcccacaggtcgaaggcctggcaggtccccacctggtgcctgtgggctgggagagccatttggccctacgcgtgcggaaccttcaacatttccgaggcctgcctgcctccttccactgctggctggagctgcctggagaacttcggggactgccggccaccctggaggagacagcaggggattcaggcctcatccactgccaggcccaccagttttatccctccatgtcccagcgggagctcccagtgcccatctacgtcacccagggtgaagcccagaggctggacaacacccatgctctttatgtgatcctgtacgactgcgccatgggccacccggactgcagccactgccaagcggccaacaggagcctgggctgcctgtggtgtgctgacggccagcctgcctgtcgctatgggcccttgtgcccgccgggggctgtggagctgctgtgtcctgcgcccagcattgatgcagtcgagcccctgaccggtccccctgagggaggcttggccctcaccatcctgggctccaacctgggccgggccttcgccgatgtgcagtacgccgtgagcgtggccagccggccctgcaaccctgagccctctctctaccgcacgtcggcccggattgtgtgtgtgacatctcctgcccccaatggcaccactgggcccgtccgggtggccattaagagccagccaccaggcatctcaagccagcacttcacctaccaggaccctgtcctgctgagcctgagtcctcgctggggcccccaggcagggggcacccagctcaccatccgaggtcagcacctccagacaggtggcaacaccagtgccttcgtgggtggccaaccctgtcccatcctggagccagtgtgtccggaggccatcgtgtgccgtaccaggccccaggctgccccaggagaagcagcggtccttgtggtctttggccatgcccagcgcacactgctcgccagccccttccgctacaccgccaacccccagcttgtagcggcggagcccagtgccagcttccgggggggtgggcgactgatccgtgtcaggggcaccggcctagacgtggtgcagcggcccctactgtctgtgtggctggaggctgacgcagaggtgcaggcttccagggcccagccccaggacccacagccaaggaggagctgtggagcccctgctgcggacccccaggcttgtatccagctcggtggggggctgctgcagtgctccaccgtctgctccgtcaactcgtccagcctcctcctgtgccggagccctgctgtaccagacagagcccacccgcagcgggtcttcttcaccctagacaacgtgcaagtggacttcgccagtgccagtgggggccagggcttcctgtaccagcccaacccccgcctggcacccctcagccgcgaggggcctgcccgcccctaccgcctcaagccaggccatgtcctggatgtggagggcgagggcctcaacctgggcatcagcaaggaggaggtgcgcgtgcacatcggccgcggcgagtgcctggtgaagacgctcacgcgcacccacctgtactgcgagccgcctgcgcacgccccgcagcctgccaatggctccggcctgccacagttcgtggtgcagatgggcaatgtgcagctggccctgggccctgtgcagtacgaggctgaacccccgctgtctgcctttcccgtggaggcccaggcaggcgtgggcatgggtgctgcagtgctgattgccgccgtgctcctcctcaccctcatgtacaggcacaagagcaagcaggccctgcgggactaccagaaggtgctagtgcagctggagagcctggagaccggcgtgggagaccagtgccgcaaggagttcacagacctcatgacggagatgaccgacctcagcagcgacctggagggcagcgggatccccttcctggactaccgcacctacgccgagcgcgccttcttccctggccatggcggttgcccgctgcagcccaagcctgaggggccaggggaggacggccactgtgccactgtgcgccagggcctcacgcagctctccaacctgctcaacagcaagctcttcctcctcacgctcatccacaccctggaggagcagcccagcttttcccagagggatcgctgccatgtggcttcgctgctgtcgctagcgctacacggcaagctggagtacctgacggacatcatgaggaccctgctgggtgacctggcggcccattacgtgcacaggaaccccaagctcatgctacgcaggacagagaccatggtggagaaactgctcaccaactggctgtccatctgcctgtacgccttcctgagggaggtggctggtgaaccactgtacatgctcttccgggccatccagtaccaggtggacaaaggccccgtggacgccgtgacaggcaaggccaaacggaccctgaatgatagccgcttgctgcgggaggacgtggagttccagcccctgacgctgatggtgctggtggggcccggggctggcggggccgcaggcagcagcgagatgcagcgcgtgccagcccgggtgctcgacacggacaccatcacccaggtcaaggagaaggtgttggaccaagtctacaagggcacccccttctcccagaggccctcagtgcatgccctagaccttgagtggcgctcaggcctggctggtcacctgaccctatcggacgaagacttgacctccgtgacccaaaaccactggaagagactcaacaccttgcaacactacaaggtcccagatggagcaacagtggggctcgtccctcagctgcaccgtggcagcaccatctcccagagcctggcccagaggtgccccttgggagagaacatacccacgctggaggatggcgaggaggggggggtgtgcctctggcacctggtgaaagccaccgaggagccagaaggggccaaggtgcggtgcagcagcctgcgggagcgcgagccagcaagggccaaggccattccggaaatctacctcacccgtctgctgtccatgaagggcacgctgcagaagtttgtggacgacaccttccaggccattctcagcgtgaaccggcccatccccatcgccgtcaagtacctgtttgaccttctggatgagctagcagagaagcacggcatcgaggacccagggaccctgcacatctggaagaccaacagtctgctgctgcggttctgggtgaatgccttgaagaacccacagctcatctttgatgtacgggtgtcggacaatgtggacgccatccttgctgtcatcgcccagaccttcattgactcctgtaccacctcggagcataaagtgggccgggattccccagtgaacaaactgctctacgcccgggagatcccacgctacaagcagatggtggagaggtactatgcggacattcgccagagctctccggcgagctaccaggagatgaactctgctttggctgagctctccgggaactacacttctgctccccactgtctggaggctctgcaagaactctacaaccacatccacaggtactatgatcagattatcagtgccctggaggaggaccctgtgggccagaagctgcagctggcctgccgcctgcagcaggtcgccgccctggtggaaaacaaagtgactgacctgtgagctctggctcagacagcagcaagccggatccaccaacaccgcagcgccttatgaccccggaaccgagccagccactgaggggagctggcagagcctgggggcacagggtgcaaagccaggcactgtgcccagcagtgggctccctgcctgccacctcccctgccagcccacccaccttccccccacctgagattgtttctaatttataaggatccccctccttccccctctccccattgtatttatttgcctgctggaaaatcacatccggaaataaaatagaaatatgtctttttattttattttg

SEQ ID NO: 12942 - protein, 1909 aa, Homo sapiens; identical to SEQ ID NO: 2227

SEQ ID NO: 12943 - DNA, 677 bp, Homo sapiens
gcattgtggggagggaggctggggctctgtgagacgtgctcctggcaccgccagctgctacttggccctcgccggtggcccaccaggacaatgcccccccgcagccatctcatgcccatcgccactgccctggggcagctgaactgagcgtatgtgccacgccgcccaggagacccctctgctgcaccacttcatgcacccccgctgccttgccccagtgcttcctcgccctggagctgggcgccagcatggagctcacccctgcctcttcgctgacttgctccttgctcagcccgcggctgcctggctctttcccccagctgcggagggttcctccttgcagccggccctggctgcccaaggcccccgtgatggctcgctggcctcccttcggcctctgcctcctcctgctgctgctgtccccaccgccactgcccttgacaggggcccatcgcttctccgcacctaataccactctcaaccacttggcactggcacctggccgaggcacactctatgtcggcgcagtgaaccgcctcttccagctcagccccgagctgcagctcgaggccgtggctgtcactggccctgtaatcgacagccctgactgcgtgcccttccgtgacccagccgagtgcccacaggcccagctcactgacaatgccaaccagctgctg

SEQ ID NO: 12944 - protein, 142 aa, Homo sapiens
MELTPASSLTCSLLSPRLPGSFPQLRRVPPCSRPWLPKAPVMARWPPFGLCLLLLLLSPPPLPLTGAHRFSAPNTTLNHLALAPGRGTLYVGAVNRLFQLSPELQLEAVAVTGPVIDSPDCVPFRDPAECPQAQLTDNANQL

SEQ ID NO: 12945 - DNA, 582 bp, Homo sapiens
ttgtggggagggaggctggggctctgtgagacgtgctcctggcaccgccagctgctacttggccctcgccggtggcccaccaggacaatgcccccccgcagccatctcatgcccatcgccactgccctggggcagctgaactgagcgtatgtgccacgccgcccaggagacccctctgctgcaccacttcatggtaagtgcccaggcccggtgtccccagaaatgttcctgggaggggcagggtagggcaggatggctgtggccaggcccaggacatacaggctgcagcctccctcatggcagacactgccccagatagcccggggtccgcaggaagtgtccgtgctcttcctgcctgtgttcctgagataagcggctcctgggccttcctccaggcgctgctctgccctgagtcgcagcggccccactcctggtcggcatgtgaccacacacccagggcagcatctctctgtggagggcaggaggggccagagaaggggctgctcccacctctcaccctcgggggctcaccccggggtcccaccaggcacacccaggaaccatctccagtctggcacccct

SEQ ID NO: 12946 - protein, 94 aa, Homo sapiens
MADTAPDSPGSAGSVRALPACVPEISGSWAFLQALLCPESQRPHSWSACDHTPRAASLCGGQEGPEKGLLPPLTLGGSPRGPTRHTQEPSPVWH

SEQ ID NO: 12947 - DNA, 365 bp, Homo sapiens
acaatgcccccccgcagccatctcatgcccatcgccactgccctggggcagctgaactgagcgtatgtgccacgccgcccaggagacccctctgctgcaccacttcatgccctgactgcgtgcccttccgtgacccagccgagtgcccacaggcccagctcactgacaatgccaaccagctgctgctggtgagcagccgcgcccaggagctggtggcctgcgggcaggtgcggcagggcgtgtgtgagacacggcgccttggggatgtggccgaggtgctgtaccaggctgaggaccctggtgacgggcagtttgtggctgccaataccccgggagtggcaacggtggggctggtggtgcccttg

SEQ ID NO: 12948 - protein, 32 aa, Homo sapiens
MWPRCCTRLRTLVTGSLWLPIPREWQRWGWWC

SEQ ID NO: 12949 - DNA, 1511 bp, Homo sapiens
gtgaaccggcccatccccatcgccgtcaagtacctgtttgaccttctggatgagctagcagagaagcacggcatcgaggacccagggaccctgcacatctggaagaccaacaggtgcctttcctgctgccccacccctgctgtgcatatggtccactgagtcccagagagaccaggacattcccagggtggatgcgcccacctggggtttctggaacttacaggaagatctagggcccaggtcacctaggccaccaggccagcttccagcggcccctggctccgagtgtgttgccagtaggctggagtacatggggcggagatcacgatggcaggccagggcctcacgcccacgcctgccctgcgcccccagtctgctgctgcggttctgggtgaatgccttgaagaacccacagctcatctttgatgtacgggtgtcggacaatgtggacgccatccttgctgtcatcgcccagaccttcattgactcctgtaccacctcggagcataaagtgggccgggtgagagcagtgccagcagcagcagctggcaggggcttgaggaggaaaggcttatgggggaagcctagagggctgtgcacagagctctgggtgggcagtggcagcatcatgggggcaccttcacctccgagctcatgcctagcgcctcccctccctccggagcaggattccccagtgaacaaactgctctacgcccgggagatcccacgctacaagcagatggtggagaggtgggtgtcagaggcatcggggctgcggggaagggggctgccccacccctaacgaagtctgctcctccaggtactatgcggacattcgccagagctctccggcgagctaccaggagatgaactctgctttggctgagctctccggggtgaggcatggcccggggggtgcgcctgtccacacgtgggtggaaagactagcagagcagaggggggagacttggggcttgaggaccaggctgggacctcactgcccccctccacgtggtgcccccagaactacacttctgctccccactgtctggaggctctgcaagaactctacaaccacatccacaggtactatgatcagattatcagtgccctggaggaggaccctgtgggccagaagctgcagctggcctgccgcctgcagcaggtcgccgccctggtggaaaacaaagtgactgacctgtgagctctggctcagacagcagcaagccggatccaccaacaccgcagcgccttatgaccccggaaccgagccagccactgaggggagctggcagagcctgggggcacagggtgcaaagccaggcactgtgcccagcagtgggctccctgcctgccacctcccctgccagcccacccaccttccccccacctgagattgtttctaatttataaggatccccctccttccccctctccccattgtatttatttgcctgctggaaaatcacatccggaaataaaatagaaatatgtctttttattttattttg

SEQ ID NO: 12950 - protein, 108 aa, Homo sapiens
MNSALAELSGVRHGPGGAPVHTWVERLAEQRGETWGLRTRLGPHCPPPRGAPRTTLLLPTVWRLCKNSTTTSTGTMIRLSVPWRRTLWARSCSWPAACSRSPPWWKTK

SEQ ID NO: 12951 - DNA, 1643 bp, Homo sapiens
gtgaaccggcccatccccatcgccgtcaagtacctgtttgaccttctggatgagctagcagagaagcacggcatcgaggacccagggaccctgcacatctggaagaccaacaggtgcctttcctgctgccccacccctgctgtgcatatggtccactgagtcccagagagaccaggacattcccagggtggatgcgcccacctggggtttctggaacttacaggaagatctagggcccaggtcacctaggccaccaggccagcttccagcggcccctggctccgagtgtgttgccagtaggctggagtacatggggcggagatcacgatggcaggccagggcctcacgcccacgcctgccctgcgcccccagtctgctgctgcggttctgggtgaatgccttgaagaacccacagctcatctttgatgtacgggtgtcggacaatgtggacgccatccttgctgtcatcgcccagaccttcattgactcctgtaccacctcggagcataaagtgggccgggtgagagcagtgccagcagcagcagctggcaggggcttgaggaggaaaggcttatgggggaagcctagagggctgtgcacagagctctgggtgggcagtggcagcatcatgggggcaccttcacctccgagctcatgcctagcgcctcccctccctccggagcaggattccccagtgaacaaactgctctacgcccgggagatcccacgctacaagcagatggtggagaggtgggtgtcagaggcatcggggctgcggggaagggggctgccccacccctaacgaagtctgctcctccaggtactatgcggacattcgccagagctctccggcgagctaccaggagatgaactctgctttggctgagctctccgggaactacacttctgctccccactgtctggaggctctgcaagaactctacaaccacatccacaggtactatgatcaggtgaggcccagggcactccggaggggaggcacagtggagcgggaggcccgtggaccctcccgggggagcaggggtgccagcccatgctggcggggcccaggctggggaagggactcggctttcattctgattccccagggagacgccaggcagcccctgctggatccccaggctcctgcggtgatggaagcagggtgggtggccctgggccagcaggcagaggggcaggctcagacaggcaccctcctctgcccgggcagattatcagtgccctggaggaggaccctgtgggccagaagctgcagctggcctgccgcctgcagcaggtcgccgccctggtggaaaacaaagtgactgacctgtgagctctggctcagacagcagcaagccggatccaccaacaccgcagcgccttatgaccccggaaccgagccagccactgaggggagctggcagagcctgggggcacagggtgcaaagccaggcactgtgcccagcagtgggctccctgcctgccacctcccctgccagcccacccaccttccccccacctgagattgtttctaatttataaggatccccctccttccccctctccccattgtatttatttgcctgctggaaaatcacatccggaaataaaatagaaatatgtctttttattttattttg

SEQ ID NO: 12952 - protein, 152 aa, Homo sapiens
MNSALAELSGNYTSAPHCLEALQELYNHIHRYYDQVRPRALRRGGTVEREARGPSRGSRGASPCWRGPGWGRDSAFILIPQGDARQPLLDPQAPAVMEAGWVALGQQAEGQAQTGTLLCPGRLSVPWRRTLWARSCSWPAACSRSPPWWKTK

SEQ ID NO: 12953 - DNA, 628 bp, Homo sapiens
ggcagcatcatgggggcaccttcacctccgagctcatgcctagcgcctcccctccctccggagcaggattccccagtgaacaaactgctctacgcccgggagatcccacgctacaagcagatggtggagaggtactatgcggacattcgccagagctctccggcgagctaccaggagatgaactctgctttggctgagctctccgggaactacacttctgctccccactgtctggaggctctgcaagaactctacaaccacatccacaggtactatgatcaggtcgccgccctggtggaaaacaaagtgactgacctgtgagctctggctcagacagcagcaagccggatccaccaacaccgcagcgccttatgaccccggaaccgagccagccactgaggggagctggcagagcctgggggcacagggtgcaaagccaggcactgtgcccagcagtgggctccctgcctgccacctcccctgccagcccacccaccttccccccacctgagattgtttctaatttataaggatccccctccttccccctctccccattgtatttatttgcctgctggaaaatcacatccggaaataaaatagaaatatgtctttttattttattttg

SEQ ID NO: 12954 - protein, 103 aa, Homo sapiens
MGAPSPPSSCLAPPLPPEQDSPVNKLLYAREIPRYKQMVERYYADIRQSSPASYQEMNSALAELSGNYTSAPHCLEALQELYNHIHRYYDQVAALVENKVTDL

SEQ ID NO: 12955 - DNA, 565 bp, Homo sapiens
aggtactatgcggacattcgccagagctctccggcgagctaccaggagatgaactctgctttggctgagctctccgggaactacacttctgctccccactgtctggaggctctgcaagaactctacaaccacatccacaggtactatgatcagattatcagtgccctggaggaggaccctgtgggccagaagctgcagctggcctgccgcctgcagcaggtcgccgccctggtggaaaacaaagtgactgacctgtgagctctggctcagacagcagcaagccggatccaccaacaccgcagcgccttatgaccccggaaccgagccagccactgaggggagctggcagagcctgggggcacagggtgcaaagccaggcactgtgcccagcagtgggctccctgcctgccacctcccctgccagcccacccaccttccccccacctgagattgtttctaatttataaggatccccctccttccccctctccccattgtatttatttgcctgctggaaaatcacatccggaaataaaatagaaatatgtctttttattttattttg

SEQ ID NO: 12956 - protein, 69 aa, Homo sapiens
MNSALAELSGNYTSAPHCLEALQELYNHIHRYYDQIISALEEDPVGQKLQLACRLQQVAALVENKVTDL

SEQ ID NO: 12957 - RNA, 85 nt, Homo sapiens
  misc_RNA: miRNA sequence.
aggguagagggaugagggggaaaguucuauaguccuguaauuagaucucaggacuauagaacuuucccccucaucccucugcccu

SEQ ID NO: 12958 - DNA, 21 bp, Homo sapiens
tttctggggaygggtcttcat

SEQ ID NO: 12959 - DNA, 21 bp, Homo sapiens
acaacgttccrtcatatggat

SEQ ID NO: 12960 - DNA, 21 bp, Homo sapiens
ggacccagatmctgttcagga

SEQ ID NO: 12961 - DNA, 21 bp, Homo sapiens
agtgagatgcmacgatttcga

SEQ ID NO: 12962 - DNA, 21 bp, Homo sapiens
aagacccaaayaaagtggcac

SEQ ID NO: 12963 - DNA, 21 bp, Homo sapiens
atgtactcacragcctacatg

SEQ ID NO: 12964 - DNA, 21 bp, Homo sapiens
acctggtgccmaggtcctcca

SEQ ID NO: 12965 - DNA, 21 bp, Homo sapiens
cacaggcgagygcacgcggac

SEQ ID NO: 12966 - DNA, 21 bp, Homo sapiens
tgcaagaccgygcccacagct

SEQ ID NO: 12967 - DNA, 21 bp, Homo sapiens
ggagcactctygagtgctgtg

SEQ ID NO: 12968 - DNA, 21 bp, Homo sapiens
atgttataggyagattcaaaa

SEQ ID NO: 12969 - DNA, 21 bp, Homo sapiens
ccacacgcgcrtgtatacgtg

SEQ ID NO: 12970 - DNA, 21 bp, Homo sapiens
tggagctctgygtgtcctccc

SEQ ID NO: 12971 - DNA, 21 bp, Homo sapiens
agatagtgttmcccaaggccc

SEQ ID NO: 12972 - DNA, 21 bp, Homo sapiens
gatgggcgacycctggccccg

SEQ ID NO: 12973 - DNA, 21 bp, Homo sapiens
agctctgtatyctaatcatgc

SEQ ID NO: 12974 - DNA, 21 bp, Homo sapiens
cctcagagaaragaaaaggac

SEQ ID NO: 12975 - DNA, 21 bp, Homo sapiens
tgctaaaagtrgccacatctc

SEQ ID NO: 12976 - DNA, 21 bp, Homo sapiens
tctcgggtgcrttctgacttc

SEQ ID NO: 12977 - DNA, 21 bp, Homo sapiens
tatcatcattygggacagtgc

SEQ ID NO: 12978 - DNA, 21 bp, Homo sapiens
tgcagccaccragaggaagac

SEQ ID NO: 12979 - DNA, 21 bp, Homo sapiens
ggatcttggcrttctccacgg

SEQ ID NO: 12980 - DNA, 21 bp, Homo sapiens
aggcttgtacrtggctggccc

SEQ ID NO: 12981 - DNA, 21 bp, Homo sapiens
ctaaactaatrttttcttaat

SEQ ID NO: 12982 - DNA, 21 bp, Homo sapiens
ttttcaccgaygcaggcccgg

SEQ ID NO: 12983 - DNA, 21 bp, Homo sapiens
ggatgtgcctrtatgtttctt

SEQ ID NO: 12984 - DNA, 21 bp, Homo sapiens
acagagatggrggcacttttc

SEQ ID NO: 12985 - DNA, 21 bp, Homo sapiens
gaggccccccrtgacgccagg

SEQ ID NO: 12986 - DNA, 21 bp, Homo sapiens
gtgacaggctytcagatcgcc

SEQ ID NO: 12987 - DNA, 21 bp, Homo sapiens
acctcattctrtggtagctcc

SEQ ID NO: 12988 - DNA, 21 bp, Homo sapiens
ttccttcatgygtgagatcca

SEQ ID NO: 12989 - DNA, 21 bp, Homo sapiens
aagaagtagcrggggagatgc

SEQ ID NO: 12990 - DNA, 21 bp, Homo sapiens
ctttggaaaaygacaattttg

SEQ ID NO: 12991 - DNA, 21 bp, Homo sapiens
gcccacgcaaygccaactgca

SEQ ID NO: 12992 - DNA, 21 bp, Homo sapiens
ttcttatcacrgccccgaggg

SEQ ID NO: 12993 - DNA, 21 bp, Homo sapiens
ccctgccagcyaggaccccgg

SEQ ID NO: 12994 - DNA, 21 bp, Homo sapiens
atgactaatarggatctgact

SEQ ID NO: 12995 - DNA, 21 bp, Homo sapiens
aacctgtgcaygttctagtac

SEQ ID NO: 12996 - DNA, 21 bp, Homo sapiens
catatcttttkggggccatta

SEQ ID NO: 12997 - DNA, 21 bp, Homo sapiens
tgggggttggrggaaggaagt

SEQ ID NO: 12998 - DNA, 21 bp, Homo sapiens
gagcctggggratcagaaagg

SEQ ID NO: 12999 - DNA, 21 bp, Homo sapiens
ctcacgtcacrgacttggcag

SEQ ID NO: 13000 - DNA, 21 bp, Homo sapiens
cttcctctctytcctgtttcc

SEQ ID NO: 13001 - DNA, 21 bp, Homo sapiens
cttgcggcctmttcttgcgcc

SEQ ID NO: 13002 - DNA, 21 bp, Homo sapiens
gaacgcaggtrggggctcacc

SEQ ID NO: 13003 - DNA, 21 bp, Homo sapiens
aacgttacaamctcattatag

SEQ ID NO: 13004 - DNA, 21 bp, Homo sapiens
gaaggtgatamaagcccagag

SEQ ID NO: 13005 - DNA, 21 bp, Homo sapiens
cccccagctcrtatcttctat

SEQ ID NO: 13006 - DNA, 21 bp, Homo sapiens
cccaaatcctycaaactatca

SEQ ID NO: 13007 - DNA, 21 bp, Homo sapiens
cttgcaaataytccaggggac

SEQ ID NO: 13008 - DNA, 21 bp, Homo sapiens
gatgcaagcarcagaaaagag

SEQ ID NO: 13009 - DNA, 21 bp, Homo sapiens
tcaataaaagragacaagcag

SEQ ID NO: 13010 - DNA, 21 bp, Homo sapiens
aaggggccacyacatcagtgg

SEQ ID NO: 13011 - DNA, 21 bp, Homo sapiens
cagccattcaygataaaaacc

SEQ ID NO: 13012 - DNA, 21 bp, Homo sapiens
tgcagatctaktcacaatagt

SEQ ID NO: 13013 - DNA, 21 bp, Homo sapiens
ctagttggccrgtcagtcttc

SEQ ID NO: 13014 - DNA, 21 bp, Homo sapiens
atgttcaaggygggacgattg

SEQ ID NO: 13015 - DNA, 21 bp, Homo sapiens
actttgcactrctgtgatggc

SEQ ID NO: 13016 - DNA, 21 bp, Homo sapiens
gaccaatcccragctttgaga

SEQ ID NO: 13017 - DNA, 21 bp, Homo sapiens
ttaaaataaamaaagaaggaa

SEQ ID NO: 13018 - DNA, 21 bp, Homo sapiens
gacccaaatgratatagaaac

SEQ ID NO: 13019 - DNA, 21 bp, Homo sapiens
gtctgaaaacrcaggcccaaa

SEQ ID NO: 13020 - DNA, 21 bp, Homo sapiens
aaagcagattyccaggcccca

SEQ ID NO: 13021 - DNA, 21 bp, Homo sapiens
gatcacccatrttctcaatat

SEQ ID NO: 13022 - DNA, 21 bp, Homo sapiens
cgcgaagtctkctaacccata

SEQ ID NO: 13023 - DNA, 21 bp, Homo sapiens
gactagagagrgcagtgaaca

SEQ ID NO: 13024 - DNA, 21 bp, Homo sapiens
cagtgggctcygtggctccct

SEQ ID NO: 13025 - DNA, 21 bp, Homo sapiens
tctcaaacggygtcctaatct

SEQ ID NO: 13026 - DNA, 21 bp, Homo sapiens
agtacttaaartaaacgtcag

SEQ ID NO: 13027 - DNA, 21 bp, Homo sapiens
aataaacaccygtaatcaaaa

SEQ ID NO: 13028 - DNA, 21 bp, Homo sapiens
acccctgcctygtactcactg

SEQ ID NO: 13029 - DNA, 21 bp, Homo sapiens
atggtggggcrgatcattcct

SEQ ID NO: 13030 - DNA, 21 bp, Homo sapiens
tttttcacccygtccccaaga

SEQ ID NO: 13031 - DNA, 21 bp, Homo sapiens
agctaaacatyttgtaaattt

SEQ ID NO: 13032 - DNA, 21 bp, Homo sapiens
gactgaaaccrctgaaagttc

SEQ ID NO: 13033 - DNA, 21 bp, Homo sapiens
tgtgattaaaracagtacata

SEQ ID NO: 13034 - DNA, 21 bp, Homo sapiens
aaaatagaatygagtcccttt

SEQ ID NO: 13035 - DNA, 21 bp, Homo sapiens
tataaggccgycacatgtgga

SEQ ID NO: 13036 - DNA, 21 bp, Homo sapiens
caaatgtgtcrtgggtatggt

SEQ ID NO: 13037 - DNA, 21 bp, Homo sapiens
gcagtggttarcaatgatgtt

SEQ ID NO: 13038 - DNA, 21 bp, Homo sapiens
ttgggtacacmgagaggggat

SEQ ID NO: 13039 - DNA, 21 bp, Homo sapiens
atctggtttcrcagggcccac

SEQ ID NO: 13040 - DNA, 21 bp, Homo sapiens
ccactcaaagrcaataataat

SEQ ID NO: 13041 - DNA, 21 bp, Homo sapiens
tccatcgagcmtggacaaccc

SEQ ID NO: 13042 - DNA, 21 bp, Homo sapiens
tgtgacagggrtgtgcaaggc

SEQ ID NO: 13043 - DNA, 21 bp, Homo sapiens
ttacagattayaagcctctgt

SEQ ID NO: 13044 - DNA, 21 bp, Homo sapiens
atgccagtgarcctgcagcac

SEQ ID NO: 13045 - DNA, 21 bp, Homo sapiens
acagtgaacartgcctggtac

SEQ ID NO: 13046 - DNA, 21 bp, Homo sapiens
atatgcatcaygagaatctca

SEQ ID NO: 13047 - DNA, 21 bp, Homo sapiens
ccaggagccayttattcgaat

SEQ ID NO: 13048 - DNA, 21 bp, Homo sapiens
tagcatctttytctttgccat

SEQ ID NO: 13049 - DNA, 21 bp, Homo sapiens
acatgttcaaygttactagaa

SEQ ID NO: 13050 - DNA, 21 bp, Homo sapiens
aaactcgcctygtggagggtt

SEQ ID NO: 13051 - DNA, 21 bp, Homo sapiens
tacgtgagccrttctctaagt

SEQ ID NO: 13052 - DNA, 21 bp, Homo sapiens
tccaattgccktatatcaaca

SEQ ID NO: 13053 - DNA, 21 bp, Homo sapiens
ctttgatgatytgaggagaaa

SEQ ID NO: 13054 - DNA, 21 bp, Homo sapiens
tctgatttggrctgggcttgc

SEQ ID NO: 13055 - DNA, 21 bp, Homo sapiens
attaaaccatrgacttgaagg

SEQ ID NO: 13056 - DNA, 21 bp, Homo sapiens
cctgaacatgycagagatttt

SEQ ID NO: 13057 - DNA, 21 bp, Homo sapiens
gtgaggtaacygactgtccca

SEQ ID NO: 13058 - DNA, 21 bp, Homo sapiens
atcaggtaaayaagaactcag

SEQ ID NO: 13059 - DNA, 21 bp, Homo sapiens
aaaatccactmccctgcagga

SEQ ID NO: 13060 - DNA, 21 bp, Homo sapiens
aaaatccaagyctcagttcaa

SEQ ID NO: 13061 - DNA, 21 bp, Homo sapiens
cacaagtaaaycctgtagtca

SEQ ID NO: 13062 - DNA, 21 bp, Homo sapiens
gtttcgggggkttgtttttgt

SEQ ID NO: 13063 - DNA, 21 bp, Homo sapiens
ttttacaaagmgtatacgatt

SEQ ID NO: 13064 - DNA, 21 bp, Homo sapiens
catccctagcrtttagaacag

SEQ ID NO: 13065 - DNA, 21 bp, Homo sapiens
ggccattgggktgagagagga

SEQ ID NO: 13066 - DNA, 21 bp, Homo sapiens
gacatcagccrggcatttaac

SEQ ID NO: 13067 - DNA, 21 bp, Homo sapiens
gcagacagagktttgtggatc

SEQ ID NO: 13068 - DNA, 21 bp, Homo sapiens
tttattatttktatctccatc

SEQ ID NO: 13069 - DNA, 21 bp, Homo sapiens
aggccttctcrtcctctgata

SEQ ID NO: 13070 - DNA, 21 bp, Homo sapiens
ctcatttgttytttaggacac

SEQ ID NO: 13071 - DNA, 21 bp, Homo sapiens
tcttggaccaytcctgcaaga

SEQ ID NO: 13072 - DNA, 21 bp, Homo sapiens
ttggattttaytaaattcagg

SEQ ID NO: 13073 - DNA, 21 bp, Homo sapiens
atgtagtaacraatggtgtga

SEQ ID NO: 13074 - DNA, 21 bp, Homo sapiens
aaggctagatyataccagata

SEQ ID NO: 13075 - DNA, 21 bp, Homo sapiens
gccccctgtcrtttcgtgtct

SEQ ID NO: 13076 - DNA, 21 bp, Homo sapiens
catccaaaggycctttcagcc

SEQ ID NO: 13077 - DNA, 21 bp, Homo sapiens
tctctgacackttcatgcttt

SEQ ID NO: 13078 - DNA, 21 bp, Homo sapiens
ggaatgtccayctgtctgact

SEQ ID NO: 13079 - DNA, 21 bp, Homo sapiens
tatttctgtcrctaaagtgct

SEQ ID NO: 13080 - DNA, 21 bp, Homo sapiens
agggtatcatrgcttcacgtt

SEQ ID NO: 13081 - DNA, 21 bp, Homo sapiens
gtgtctctaayctccagtctc

SEQ ID NO: 13082 - DNA, 21 bp, Homo sapiens
agacagggctrtttaagtcac

SEQ ID NO: 13083 - DNA, 21 bp, Homo sapiens
ctctttgagtygcactaaact

SEQ ID NO: 13084 - DNA, 21 bp, Homo sapiens
tgactgtgtaygaggcaccat

SEQ ID NO: 13085 - DNA, 21 bp, Homo sapiens
gcgggagacakaaagctgtga

SEQ ID NO: 13086 - DNA, 21 bp, Homo sapiens
gcaggctatcracctgaatta

SEQ ID NO: 13087 - DNA, 21 bp, Homo sapiens
cagcaattacyaagagggcca

SEQ ID NO: 13088 - DNA, 21 bp, Homo sapiens
tatctgcaaargccagcatct

SEQ ID NO: 13089 - DNA, 21 bp, Homo sapiens
ggttgggagayctggaattcc

SEQ ID NO: 13090 - DNA, 21 bp, Homo sapiens
atgcagatgtraatgttgcgg

SEQ ID NO: 13091 - DNA, 21 bp, Homo sapiens
ttgtgtattaktctgttttca

SEQ ID NO: 13092 - DNA, 21 bp, Homo sapiens
ttatgtaaacrctgttttcat

SEQ ID NO: 13093 - DNA, 21 bp, Homo sapiens
ccccagaaaayaagctggcat

SEQ ID NO: 13094 - DNA, 21 bp, Homo sapiens
aatctgtcccmgaaggaacaa

SEQ ID NO: 13095 - DNA, 21 bp, Homo sapiens
ctccaagatgraagattatca

SEQ ID NO: 13096 - DNA, 21 bp, Homo sapiens
ccatctcagakgagagtgtcc

SEQ ID NO: 13097 - DNA, 21 bp, Homo sapiens
caagaaacccrtcaatgaaca

SEQ ID NO: 13098 - DNA, 21 bp, Homo sapiens
caaaattagcmcttagcctgg

SEQ ID NO: 13099 - DNA, 21 bp, Homo sapiens
cagaaaaagtrgaacattaaa

SEQ ID NO: 13100 - DNA, 21 bp, Homo sapiens
gctgacaaggytagtcagagt

SEQ ID NO: 13101 - DNA, 21 bp, Homo sapiens
accccatggaygcttcaaata

SEQ ID NO: 13102 - DNA, 21 bp, Homo sapiens
ctggacttgargcatcttttc

SEQ ID NO: 13103 - DNA, 21 bp, Homo sapiens
ccagtgatccmgtgacaaata

SEQ ID NO: 13104 - DNA, 21 bp, Homo sapiens
ggataatgccyggctctttgg

SEQ ID NO: 13105 - DNA, 21 bp, Homo sapiens
cttcacagccytgccttgact

SEQ ID NO: 13106 - DNA, 21 bp, Homo sapiens
ccatggggaartttaattcag

SEQ ID NO: 13107 - DNA, 21 bp, Homo sapiens
ctgatttcackccaacacgtc

SEQ ID NO: 13108 - DNA, 21 bp, Homo sapiens
accacgcgtayggaggaagac

SEQ ID NO: 13109 - DNA, 21 bp, Homo sapiens
tgaagccttcrgtctcagatg

SEQ ID NO: 13110 - DNA, 21 bp, Homo sapiens
caacacgtatyattagagcaa

SEQ ID NO: 13111 - DNA, 21 bp, Homo sapiens
aaatacacagyagtgacctct

SEQ ID NO: 13112 - DNA, 21 bp, Homo sapiens
tagctccatcytttgttcctc

SEQ ID NO: 13113 - DNA, 21 bp, Homo sapiens
tgcagacagtkctaggccaag

SEQ ID NO: 13114 - DNA, 21 bp, Homo sapiens
gtgggatcagrtggaaagagt

SEQ ID NO: 13115 - DNA, 21 bp, Homo sapiens
acttgaactgrtcttaaagga

SEQ ID NO: 13116 - DNA, 21 bp, Homo sapiens
gttcttacctkatttggagtc

SEQ ID NO: 13117 - DNA, 21 bp, Homo sapiens
agggaataagytcgtggcagt

SEQ ID NO: 13118 - DNA, 21 bp, Homo sapiens
caggaatgaaraagaaacata

SEQ ID NO: 13119 - DNA, 21 bp, Homo sapiens
acagctatcarggaaacttta

SEQ ID NO: 13120 - DNA, 21 bp, Homo sapiens
atcattaagamagggacaggt

SEQ ID NO: 13121 - DNA, 21 bp, Homo sapiens
actcactgtayggattgagca

SEQ ID NO: 13122 - DNA, 21 bp, Homo sapiens
cctacacatarctgagtcgta

SEQ ID NO: 13123 - DNA, 21 bp, Homo sapiens
atgtgagaatkattatgagca

SEQ ID NO: 13124 - DNA, 21 bp, Homo sapiens
cctttttcatygtctttgctg

SEQ ID NO: 13125 - DNA, 21 bp, Homo sapiens
tgggagcctcrcggggggttg

SEQ ID NO: 13126 - DNA, 21 bp, Homo sapiens
ttagtgtggtygttaatggtc

SEQ ID NO: 13127 - DNA, 21 bp, Homo sapiens
ttggtagcttrgatgttacaa

SEQ ID NO: 13128 - DNA, 21 bp, Homo sapiens
agacctctagyagccctgaca

SEQ ID NO: 13129 - DNA, 21 bp, Homo sapiens
tgcttgcaaartttgtattga

SEQ ID NO: 13130 - DNA, 21 bp, Homo sapiens
gccttatggarcaaatactcc

SEQ ID NO: 13131 - DNA, 21 bp, Homo sapiens
tgggaggatgkctctcagtcc

SEQ ID NO: 13132 - DNA, 21 bp, Homo sapiens
atagaagccaracacatgcag

SEQ ID NO: 13133 - DNA, 21 bp, Homo sapiens
gtgctcagtayagccaagttg

SEQ ID NO: 13134 - DNA, 21 bp, Homo sapiens
gtctgacaggrtaggttcacc

SEQ ID NO: 13135 - DNA, 21 bp, Homo sapiens
acatggagggmcaacagattt

SEQ ID NO: 13136 - DNA, 21 bp, Homo sapiens
taaaactggtrgtccagtctt

SEQ ID NO: 13137 - DNA, 21 bp, Homo sapiens
tattctccttyctgtggcata

SEQ ID NO: 13138 - DNA, 21 bp, Homo sapiens
agagtcaaggrttagttggaa

SEQ ID NO: 13139 - DNA, 21 bp, Homo sapiens
attagagaaamtgtagcctgg

SEQ ID NO: 13140 - DNA, 21 bp, Homo sapiens
tgccttctccratttcagaag

SEQ ID NO: 13141 - DNA, 21 bp, Homo sapiens
gcaatatgtgrtaagtcatta

SEQ ID NO: 13142 - DNA, 21 bp, Homo sapiens
tcccaaagttyctccttcatg

SEQ ID NO: 13143 - DNA, 21 bp, Homo sapiens
tttaaaggaamttttagaagc

SEQ ID NO: 13144 - DNA, 21 bp, Homo sapiens
ataaactccaytttttaagat

SEQ ID NO: 13145 - DNA, 21 bp, Homo sapiens
tatcgtgcagraaggagggag

SEQ ID NO: 13146 - DNA, 21 bp, Homo sapiens
atactggcttmagtctggaaa

SEQ ID NO: 13147 - DNA, 21 bp, Homo sapiens
gtacaaatttraccattttgc

SEQ ID NO: 13148 - DNA, 21 bp, Homo sapiens
gagcttgagtkggggaaactt

SEQ ID NO: 13149 - DNA, 21 bp, Homo sapiens
agaagtgattygatagtattc

SEQ ID NO: 13150 - DNA, 21 bp, Homo sapiens
cagaaacaggyctattttaga

SEQ ID NO: 13151 - DNA, 21 bp, Homo sapiens
gagactccccrtttctcccag

SEQ ID NO: 13152 - DNA, 21 bp, Homo sapiens
ctatttctacraaagttatga

SEQ ID NO: 13153 - DNA, 21 bp, Homo sapiens
attaggccttytatgaacact

SEQ ID NO: 13154 - DNA, 21 bp, Homo sapiens
ctctgttcctragttctcaag

SEQ ID NO: 13155 - DNA, 21 bp, Homo sapiens
catgtaattaktataggtttt

SEQ ID NO: 13156 - DNA, 21 bp, Homo sapiens
ttgacctttayggccaagatc

SEQ ID NO: 13157 - DNA, 21 bp, Homo sapiens
ctcattacaargcaaaaaggg

SEQ ID NO: 13158 - DNA, 21 bp, Homo sapiens
atccatacccyccaccccttg

SEQ ID NO: 13159 - DNA, 21 bp, Homo sapiens
tttcttaaaamaggcttaaat

SEQ ID NO: 13160 - DNA, 21 bp, Homo sapiens
attgaattcaygaaggtaaaa

SEQ ID NO: 13161 - DNA, 21 bp, Homo sapiens
caaccccaagrcagtaaacca

SEQ ID NO: 13162 - DNA, 21 bp, Homo sapiens
gtatgtcttgygatttttttt

SEQ ID NO: 13163 - DNA, 21 bp, Homo sapiens
ttataaacatrtaatttgact

SEQ ID NO: 13164 - DNA, 21 bp, Homo sapiens
aatgaatataygctaacattc

SEQ ID NO: 13165 - DNA, 21 bp, Homo sapiens
ccacagagctraagaactatt

SEQ ID NO: 13166 - DNA, 21 bp, Homo sapiens
attcttagttktaactttgca

SEQ ID NO: 13167 - DNA, 21 bp, Homo sapiens
caagaatggayttggtgctcc

SEQ ID NO: 13168 - DNA, 21 bp, Homo sapiens
gagaagcaatmtctgaagctc

SEQ ID NO: 13169 - DNA, 21 bp, Homo sapiens
accacagcacratttcctctc

SEQ ID NO: 13170 - DNA, 21 bp, Homo sapiens
gagaactgacygatttgaatg

SEQ ID NO: 13171 - DNA, 21 bp, Homo sapiens
aaataacacgktggtgcttgg

SEQ ID NO: 13172 - DNA, 21 bp, Homo sapiens
agagactgackcgggaaaaat

SEQ ID NO: 13173 - DNA, 21 bp, Homo sapiens
cacccttgccrttataaacta

SEQ ID NO: 13174 - DNA, 21 bp, Homo sapiens
gaaaagagagraaatgtcaga

SEQ ID NO: 13175 - DNA, 21 bp, Homo sapiens
agcaaaggaayaagcagttcc

SEQ ID NO: 13176 - DNA, 21 bp, Homo sapiens
tctttcttttrgccagagtac

SEQ ID NO: 13177 - DNA, 21 bp, Homo sapiens
atccattgtamttgataggag

SEQ ID NO: 13178 - DNA, 21 bp, Homo sapiens
acccatcagtrtaacaaatgg

SEQ ID NO: 13179 - DNA, 21 bp, Homo sapiens
ttgctgtagtkagcacctagc

SEQ ID NO: 13180 - DNA, 21 bp, Homo sapiens
ggctctcaccrtgctctggtt

SEQ ID NO: 13181 - DNA, 21 bp, Homo sapiens
gaatgcccaaytggagtagaa

SEQ ID NO: 13182 - DNA, 21 bp, Homo sapiens
aatgataacaracttgatgat

SEQ ID NO: 13183 - DNA, 21 bp, Homo sapiens
gtcagggttargtgccattga

SEQ ID NO: 13184 - DNA, 21 bp, Homo sapiens
taatgggcatragaatgtatt

SEQ ID NO: 13185 - DNA, 21 bp, Homo sapiens
gcttggtccartgtagatctg

SEQ ID NO: 13186 - DNA, 21 bp, Homo sapiens
agtgtttttgyctataacaag

SEQ ID NO: 13187 - DNA, 21 bp, Homo sapiens
atctgttaacrgcctgcagag

SEQ ID NO: 13188 - DNA, 21 bp, Homo sapiens
cctagatctartggaatgata

SEQ ID NO: 13189 - DNA, 21 bp, Homo sapiens
gtacttctcaycttctatttg

SEQ ID NO: 13190 - DNA, 21 bp, Homo sapiens
caggtgtttargtttttggat

SEQ ID NO: 13191 - DNA, 21 bp, Homo sapiens
ctgaggaaaakactccacccc

SEQ ID NO: 13192 - DNA, 21 bp, Homo sapiens
ggtggattgayagtgtgtgtg

SEQ ID NO: 13193 - DNA, 21 bp, Homo sapiens
aagttcttgtytcacttaggt

SEQ ID NO: 13194 - DNA, 21 bp, Homo sapiens
ttgaggctaargacagtttca

SEQ ID NO: 13195 - DNA, 21 bp, Homo sapiens
agttactggcrcaggaataga

SEQ ID NO: 13196 - DNA, 21 bp, Homo sapiens
ctacccaaaaytactcccaag

SEQ ID NO: 13197 - DNA, 21 bp, Homo sapiens
aaaccattctmaattccagtt

SEQ ID NO: 13198 - DNA, 21 bp, Homo sapiens
aaaagattagygaattcctat

SEQ ID NO: 13199 - DNA, 21 bp, Homo sapiens
cttcactttgrgacccagttc

SEQ ID NO: 13200 - DNA, 21 bp, Homo sapiens
gaagcggccaratcctcctgt

SEQ ID NO: 13201 - DNA, 21 bp, Homo sapiens
atttcacctgyggtgattttg

SEQ ID NO: 13202 - DNA, 21 bp, Homo sapiens
aaatctcttgrtagggcagcc

SEQ ID NO: 13203 - DNA, 21 bp, Homo sapiens
gcaaaagcagytggatgtgtc

SEQ ID NO: 13204 - DNA, 21 bp, Homo sapiens
ctgaggcctgractgtgtcga

SEQ ID NO: 13205 - DNA, 21 bp, Homo sapiens
gcttaattgcrtcactccttc

SEQ ID NO: 13206 - DNA, 21 bp, Homo sapiens
tacttgttatkcatttcccaa

SEQ ID NO: 13207 - DNA, 21 bp, Homo sapiens
gccggtaaccrtaattccact

SEQ ID NO: 13208 - DNA, 21 bp, Homo sapiens
ttccagttttyggatgggaaa

SEQ ID NO: 13209 - DNA, 21 bp, Homo sapiens
cagaccttgcrctcattcatg

SEQ ID NO: 13210 - DNA, 21 bp, Homo sapiens
cttaatctccrggggtatctc

SEQ ID NO: 13211 - DNA, 21 bp, Homo sapiens
tgatccacatracgcgtcact

SEQ ID NO: 13212 - DNA, 21 bp, Homo sapiens
accacataagrgcacaggcca

SEQ ID NO: 13213 - DNA, 21 bp, Homo sapiens
cagaacagtcyccggagtttg

SEQ ID NO: 13214 - DNA, 21 bp, Homo sapiens
gatagtaagayctgacgttgt

SEQ ID NO: 13215 - DNA, 21 bp, Homo sapiens
cacagcaaacyacccaaagtg

SEQ ID NO: 13216 - DNA, 21 bp, Homo sapiens
catttagcttktccaggcctg

SEQ ID NO: 13217 - DNA, 21 bp, Homo sapiens
tttattgaatraataaatgat

SEQ ID NO: 13218 - DNA, 21 bp, Homo sapiens
actaccaacamtagttacggc

SEQ ID NO: 13219 - DNA, 21 bp, Homo sapiens
catggttacarcttctcagtc

SEQ ID NO: 13220 - DNA, 21 bp, Homo sapiens
ttctgagcacrgtgaaaatcc

SEQ ID NO: 13221 - DNA, 21 bp, Homo sapiens
ggtttaattcytgggctacta

SEQ ID NO: 13222 - DNA, 21 bp, Homo sapiens
cagggaccttyggcatcgttc

SEQ ID NO: 13223 - DNA, 21 bp, Homo sapiens
tctcatctggyctctcaggtt

SEQ ID NO: 13224 - DNA, 21 bp, Homo sapiens
aggtgggtatkgctttctcca

SEQ ID NO: 13225 - DNA, 21 bp, Homo sapiens
catttctgtcygctatatttt

SEQ ID NO: 13226 - DNA, 21 bp, Homo sapiens
cacaggtctgrgcaccagcct

SEQ ID NO: 13227 - DNA, 21 bp, Homo sapiens
caaaaccagarctgacgacga

SEQ ID NO: 13228 - DNA, 21 bp, Homo sapiens
tgatcggatgragtggggctc

SEQ ID NO: 13229 - DNA, 21 bp, Homo sapiens
atgctaaaaamaaaaaatact

SEQ ID NO: 13230 - DNA, 21 bp, Homo sapiens
gaatctcaaaraggttcactc

SEQ ID NO: 13231 - DNA, 21 bp, Homo sapiens
agtgaggcaayggcaagtgtg

SEQ ID NO: 13232 - DNA, 21 bp, Homo sapiens
cctgctgatcyttcagagggt

SEQ ID NO: 13233 - DNA, 21 bp, Homo sapiens
cctcaaaactytatggccttc

SEQ ID NO: 13234 - DNA, 21 bp, Homo sapiens
tacctacttayatgaaacaca

SEQ ID NO: 13235 - DNA, 21 bp, Homo sapiens
cctgggatggmactccctaat

SEQ ID NO: 13236 - DNA, 21 bp, Homo sapiens
ccatcttatgycttttttctt

SEQ ID NO: 13237 - DNA, 21 bp, Homo sapiens
cctcaaggttkcaggaggaaa

SEQ ID NO: 13238 - DNA, 21 bp, Homo sapiens
tttttctgccygtgttatatt

SEQ ID NO: 13239 - DNA, 21 bp, Homo sapiens
actcttctatkccacccacag

SEQ ID NO: 13240 - DNA, 21 bp, Homo sapiens
ctacaagtgcyagtgacctgt

SEQ ID NO: 13241 - DNA, 21 bp, Homo sapiens
ttgttgattcrgtagatgctt

SEQ ID NO: 13242 - DNA, 21 bp, Homo sapiens
aaaatttttarcggtgagtga

SEQ ID NO: 13243 - DNA, 21 bp, Homo sapiens
cttggcctaargcaacatctt

SEQ ID NO: 13244 - DNA, 21 bp, Homo sapiens
aagtgtgagayggtactgcct

SEQ ID NO: 13245 - DNA, 21 bp, Homo sapiens
agtgatcaacmcaaactcaaa

SEQ ID NO: 13246 - DNA, 21 bp, Homo sapiens
cctatgcacaragcctgaagt

SEQ ID NO: 13247 - DNA, 21 bp, Homo sapiens
ggaatcattgygcaagatgga

SEQ ID NO: 13248 - DNA, 21 bp, Homo sapiens
atgagaaatgmtgacccaagg

SEQ ID NO: 13249 - DNA, 21 bp, Homo sapiens
gacagttgctrcaaactgcaa

SEQ ID NO: 13250 - DNA, 21 bp, Homo sapiens
agctagtcctyctcttaccca

SEQ ID NO: 13251 - DNA, 21 bp, Homo sapiens
agcgatataarccagggagaa

SEQ ID NO: 13252 - DNA, 21 bp, Homo sapiens
tgtagtcttcycaaagtttgc

SEQ ID NO: 13253 - DNA, 21 bp, Homo sapiens
aagctcccctycttgttctca

SEQ ID NO: 13254 - DNA, 21 bp, Homo sapiens
catcctgccargatggcttca

SEQ ID NO: 13255 - DNA, 21 bp, Homo sapiens
agttctccccrtagccactgg

SEQ ID NO: 13256 - DNA, 21 bp, Homo sapiens
agcagaagggrcctccaagtc

SEQ ID NO: 13257 - DNA, 21 bp, Homo sapiens
tgctcaaaatkatgatactct

SEQ ID NO: 13258 - DNA, 21 bp, Homo sapiens
ggaggcgcttrctcctgggca

SEQ ID NO: 13259 - DNA, 21 bp, Homo sapiens
ctgggatcctrtgaaaatttt

SEQ ID NO: 13260 - DNA, 21 bp, Homo sapiens
ttaattttatraggctctccc

SEQ ID NO: 13261 - DNA, 21 bp, Homo sapiens
gtgtcctgggytgaggaaatg

SEQ ID NO: 13262 - DNA, 21 bp, Homo sapiens
ctagagctgcygcaacaaagt

SEQ ID NO: 13263 - DNA, 21 bp, Homo sapiens
taagtacttcktcactgaccc

SEQ ID NO: 13264 - DNA, 21 bp, Homo sapiens
gggactcagcytcattcctga

SEQ ID NO: 13265 - DNA, 21 bp, Homo sapiens
gaccttgagartgagtggcgg

SEQ ID NO: 13266 - DNA, 21 bp, Homo sapiens
taactgaaacycctccacagt

SEQ ID NO: 13267 - DNA, 21 bp, Homo sapiens
cagagctcgckgagactggcc

SEQ ID NO: 13268 - DNA, 21 bp, Homo sapiens
gcaattcatcytatacctgcc

SEQ ID NO: 13269 - DNA, 21 bp, Homo sapiens
gaagtccccartgacatacag

SEQ ID NO: 13270 - DNA, 21 bp, Homo sapiens
tgcaaaacccmagtgaagccc

SEQ ID NO: 13271 - DNA, 21 bp, Homo sapiens
gccaggggatrggggttaggg

SEQ ID NO: 13272 - DNA, 21 bp, Homo sapiens
cattactctcrtagtctcttc

SEQ ID NO: 13273 - DNA, 21 bp, Homo sapiens
gcagccatgcrgagaacgata

SEQ ID NO: 13274 - DNA, 21 bp, Homo sapiens
caccttattgkgtgctcttac

SEQ ID NO: 13275 - DNA, 21 bp, Homo sapiens
aattgtgaaargcgagtattc

SEQ ID NO: 13276 - DNA, 21 bp, Homo sapiens
ttttcttggcrctttgcctga

SEQ ID NO: 13277 - DNA, 21 bp, Homo sapiens
ttagtgagtayttagtgcctt

SEQ ID NO: 13278 - DNA, 21 bp, Homo sapiens
atttattatgygggtttaact

SEQ ID NO: 13279 - DNA, 21 bp, Homo sapiens
catttccaacrtctagagcca

SEQ ID NO: 13280 - DNA, 21 bp, Homo sapiens
tgtgatatcamtgtgtgtttt

SEQ ID NO: 13281 - DNA, 21 bp, Homo sapiens
tagtaatgttktatggcttga

SEQ ID NO: 13282 - DNA, 21 bp, Homo sapiens
tatcatttgaytgaaatttca

SEQ ID NO: 13283 - DNA, 21 bp, Homo sapiens
cacctgctgartgctcagtac

SEQ ID NO: 13284 - DNA, 21 bp, Homo sapiens
acgggtaaccrgaaaggaagc

SEQ ID NO: 13285 - DNA, 21 bp, Homo sapiens
aatcagcttcygagcaattgt

SEQ ID NO: 13286 - DNA, 21 bp, Homo sapiens
ttttatgtgcrgtatgagatg

SEQ ID NO: 13287 - DNA, 21 bp, Homo sapiens
aaaaaaaatgygaaagagggt

SEQ ID NO: 13288 - DNA, 21 bp, Homo sapiens
ttccattttayagccagagtg

SEQ ID NO: 13289 - DNA, 21 bp, Homo sapiens
ttttttatttrgggctttctg

SEQ ID NO: 13290 - DNA, 21 bp, Homo sapiens
tcaggttatgragataccatc

SEQ ID NO: 13291 - DNA, 21 bp, Homo sapiens
gaccttttgtrttactgaccg

SEQ ID NO: 13292 - DNA, 21 bp, Homo sapiens
gaatatttggmagaagtctca

SEQ ID NO: 13293 - DNA, 21 bp, Homo sapiens
agtccttacaraattgtccaa

SEQ ID NO: 13294 - DNA, 21 bp, Homo sapiens
tgagtgtgagkaagtaagatt

SEQ ID NO: 13295 - DNA, 21 bp, Homo sapiens
acttaggactraagaagcaat

SEQ ID NO: 13296 - DNA, 21 bp, Homo sapiens
ggcaaagttaratgaaaaaac

SEQ ID NO: 13297 - DNA, 21 bp, Homo sapiens
tgtatacaatktcaaattgtt

SEQ ID NO: 13298 - DNA, 21 bp, Homo sapiens
cacatgagaartgatacctgt

SEQ ID NO: 13299 - DNA, 21 bp, Homo sapiens
ttttctgtatragagtagctc

SEQ ID NO: 13300 - DNA, 21 bp, Homo sapiens
ccacaatgcaygacccattca

SEQ ID NO: 13301 - DNA, 21 bp, Homo sapiens
acaagggtctrcagctgactg

SEQ ID NO: 13302 - DNA, 21 bp, Homo sapiens
agatgaaaagrccgtttcagt

SEQ ID NO: 13303 - DNA, 21 bp, Homo sapiens
cctcacaagcygtgacaaatt

SEQ ID NO: 13304 - DNA, 21 bp, Homo sapiens
tatcatgtacrcttataacat

SEQ ID NO: 13305 - DNA, 21 bp, Homo sapiens
tcacttttcayctcttcaggg

SEQ ID NO: 13306 - DNA, 21 bp, Homo sapiens
atctgggtcakatgtgaccca

SEQ ID NO: 13307 - DNA, 21 bp, Homo sapiens
cctcttccccrtgctaccaag

SEQ ID NO: 13308 - DNA, 21 bp, Homo sapiens
ctttcccctcyggaagctcac

SEQ ID NO: 13309 - DNA, 21 bp, Homo sapiens
gtctgcattcytccgagttct

SEQ ID NO: 13310 - DNA, 21 bp, Homo sapiens
aagttctgttytaagatatat

SEQ ID NO: 13311 - DNA, 21 bp, Homo sapiens
gtgcagccttkgataccttta

SEQ ID NO: 13312 - DNA, 21 bp, Homo sapiens
gtgatgggcaytgggaaagct

SEQ ID NO: 13313 - DNA, 21 bp, Homo sapiens
tagctacagcrtattatttaa

SEQ ID NO: 13314 - DNA, 21 bp, Homo sapiens
ttcactgcacraggtcagaat

SEQ ID NO: 13315 - DNA, 21 bp, Homo sapiens
agagttcggcycctgccttga

SEQ ID NO: 13316 - DNA, 21 bp, Homo sapiens
ttgagtcacaragccaaggcc

SEQ ID NO: 13317 - DNA, 21 bp, Homo sapiens
cactttggtcktagatgaact

SEQ ID NO: 13318 - DNA, 21 bp, Homo sapiens
gccacaaggayggagggcttt

SEQ ID NO: 13319 - DNA, 21 bp, Homo sapiens
aaatatgcaayactttcttgc

SEQ ID NO: 13320 - DNA, 21 bp, Homo sapiens
ctctacttttrctcttctctg

SEQ ID NO: 13321 - DNA, 21 bp, Homo sapiens
cctcaaacaaraagtcctctc

SEQ ID NO: 13322 - DNA, 21 bp, Homo sapiens
tgcaccatacrggggcggaaa

SEQ ID NO: 13323 - DNA, 21 bp, Homo sapiens
cagctgaattrtcattgccct

SEQ ID NO: 13324 - DNA, 21 bp, Homo sapiens
gcaaattcttrtggtaataaa

SEQ ID NO: 13325 - DNA, 21 bp, Homo sapiens
aacttattctrtgctactcat

SEQ ID NO: 13326 - DNA, 21 bp, Homo sapiens
aagagtgggtrtcaatggtta

SEQ ID NO: 13327 - DNA, 21 bp, Homo sapiens
gttttgagggrcaggtaatag

SEQ ID NO: 13328 - DNA, 21 bp, Homo sapiens
ccagtagtgcygatgatacca

SEQ ID NO: 13329 - DNA, 21 bp, Homo sapiens
ttagggtcagrgtcaccacac

SEQ ID NO: 13330 - DNA, 21 bp, Homo sapiens
tacatttctcraaaaaagata

SEQ ID NO: 13331 - DNA, 21 bp, Homo sapiens
tgagttctgcrttctcagtag

SEQ ID NO: 13332 - DNA, 21 bp, Homo sapiens
taacgatgtcrtcttccccaa

SEQ ID NO: 13333 - DNA, 21 bp, Homo sapiens
taggtggaggycactgttccc

SEQ ID NO: 13334 - DNA, 21 bp, Homo sapiens
aaaaaggagamaccagagatt

SEQ ID NO: 13335 - DNA, 21 bp, Homo sapiens
tgcacatttargaatattgtt

SEQ ID NO: 13336 - DNA, 21 bp, Homo sapiens
catggaggatygaggagaagt

SEQ ID NO: 13337 - DNA, 21 bp, Homo sapiens
tatgaacaagyatacgccttc

SEQ ID NO: 13338 - DNA, 21 bp, Homo sapiens
gtgacttatarataatgcttt

SEQ ID NO: 13339 - DNA, 21 bp, Homo sapiens
tgagataaccratcatgtgtg

SEQ ID NO: 13340 - DNA, 21 bp, Homo sapiens
tgacaagaackactttgcagt

SEQ ID NO: 13341 - DNA, 21 bp, Homo sapiens
gaggcaatggrtggggacaga

SEQ ID NO: 13342 - DNA, 21 bp, Homo sapiens
gcccaggaccrtgccacatta

SEQ ID NO: 13343 - DNA, 21 bp, Homo sapiens
atgatatagayggtgtgaggt

SEQ ID NO: 13344 - DNA, 21 bp, Homo sapiens
acctcagaagrgagaacctct

SEQ ID NO: 13345 - DNA, 21 bp, Homo sapiens
aagcaagtatrtggggggaag

SEQ ID NO: 13346 - DNA, 21 bp, Homo sapiens
cggcacagcakttagaccagg

SEQ ID NO: 13347 - DNA, 21 bp, Homo sapiens
aatagtatttytcttttgctt

SEQ ID NO: 13348 - DNA, 21 bp, Homo sapiens
ggtttagaatyagagatgtcc

SEQ ID NO: 13349 - DNA, 21 bp, Homo sapiens
gccacatgacygcattatgcg

SEQ ID NO: 13350 - DNA, 21 bp, Homo sapiens
actgggcaaarcaagggctca

SEQ ID NO: 13351 - DNA, 21 bp, Homo sapiens
gcgtcaccgtrtgtgcatctc

SEQ ID NO: 13352 - DNA, 21 bp, Homo sapiens
gagaacacgcmttaacatgac

SEQ ID NO: 13353 - DNA, 21 bp, Homo sapiens
tttatttggarcatcattgca

SEQ ID NO: 13354 - DNA, 21 bp, Homo sapiens
ggcgcatgctragaggctctg

SEQ ID NO: 13355 - DNA, 21 bp, Homo sapiens
gcgacaagcgkgtggggttgt

SEQ ID NO: 13356 - DNA, 21 bp, Homo sapiens
taaagggaaaycaaggctgag

SEQ ID NO: 13357 - DNA, 21 bp, Homo sapiens
aatccagactygaacatccat

SEQ ID NO: 13358 - DNA, 21 bp, Homo sapiens
ggttattcatmctgtttaatc

SEQ ID NO: 13359 - DNA, 21 bp, Homo sapiens
caaataatttrgcacaactgc

SEQ ID NO: 13360 - DNA, 21 bp, Homo sapiens
cagcaggggaracctagctgc

SEQ ID NO: 13361 - DNA, 21 bp, Homo sapiens
agagtggagartacaaaatcg

SEQ ID NO: 13362 - DNA, 21 bp, Homo sapiens
atttcccactmctgatcttta

SEQ ID NO: 13363 - DNA, 21 bp, Homo sapiens
catctgctcckcaaagctagg

SEQ ID NO: 13364 - DNA, 21 bp, Homo sapiens
tattcccctgycctaatttcc

SEQ ID NO: 13365 - DNA, 21 bp, Homo sapiens
tcttctgtttyctgacccacc

SEQ ID NO: 13366 - DNA, 21 bp, Homo sapiens
aaaaatataayctcttttctc

SEQ ID NO: 13367 - DNA, 21 bp, Homo sapiens
catcacacttrtatgcttacc

SEQ ID NO: 13368 - DNA, 21 bp, Homo sapiens
tcatgagtctyacctttaaaa

SEQ ID NO: 13369 - DNA, 21 bp, Homo sapiens
ataatttttaraagtagtagt

SEQ ID NO: 13370 - DNA, 21 bp, Homo sapiens
ggaggatttaycatgaagcta

SEQ ID NO: 13371 - DNA, 21 bp, Homo sapiens
ctctgggatayggccttttac

SEQ ID NO: 13372 - DNA, 21 bp, Homo sapiens
atggtttatcmctgaaattat

SEQ ID NO: 13373 - DNA, 21 bp, Homo sapiens
ttctgtatacytagaatttac

SEQ ID NO: 13374 - DNA, 21 bp, Homo sapiens
aaggtaaaaayaacgttgaat

SEQ ID NO: 13375 - DNA, 21 bp, Homo sapiens
cctcttgtacrcattccctca

SEQ ID NO: 13376 - DNA, 21 bp, Homo sapiens
aataacagcamtattgctatt

SEQ ID NO: 13377 - DNA, 21 bp, Homo sapiens
gagaacatttrgtgcttcctc

SEQ ID NO: 13378 - DNA, 21 bp, Homo sapiens
atttaggaagygctcagtgaa

SEQ ID NO: 13379 - DNA, 21 bp, Homo sapiens
agagggttaaytgatttttag

SEQ ID NO: 13380 - DNA, 21 bp, Homo sapiens
ggaagaagcartatctatttg

SEQ ID NO: 13381 - DNA, 21 bp, Homo sapiens
tcaggactcargagtctcccc

SEQ ID NO: 13382 - DNA, 21 bp, Homo sapiens
gtagagattaytaacagtgag

SEQ ID NO: 13383 - DNA, 21 bp, Homo sapiens
ccaaaatcttycttaatttat

SEQ ID NO: 13384 - DNA, 21 bp, Homo sapiens
tgctgtgctaytcgttcactt

SEQ ID NO: 13385 - DNA, 21 bp, Homo sapiens
ttgctaggacrttaggccaca

SEQ ID NO: 13386 - DNA, 21 bp, Homo sapiens
tttttcatccrgtccagtggc

SEQ ID NO: 13387 - DNA, 21 bp, Homo sapiens
tggacagacaraggaatgcaa

SEQ ID NO: 13388 - DNA, 21 bp, Homo sapiens
atagttgagaygtcactttgt

SEQ ID NO: 13389 - DNA, 21 bp, Homo sapiens
ctcaaccaacrattgctaaat

SEQ ID NO: 13390 - DNA, 21 bp, Homo sapiens
ttaatactccmtgtggttgga

SEQ ID NO: 13391 - DNA, 21 bp, Homo sapiens
catacaaaagrctgctgtgtt

SEQ ID NO: 13392 - DNA, 21 bp, Homo sapiens
ggaaactcctrtgatacagag

SEQ ID NO: 13393 - DNA, 21 bp, Homo sapiens
ttgagtaaaaytgcattgtat

SEQ ID NO: 13394 - DNA, 21 bp, Homo sapiens
tctgcagggarcaaagcctag

SEQ ID NO: 13395 - DNA, 21 bp, Homo sapiens
gtcatatgtayagaaccaaat

SEQ ID NO: 13396 - DNA, 21 bp, Homo sapiens
ttgcctatgamagcacaaaat

SEQ ID NO: 13397 - DNA, 21 bp, Homo sapiens
tataaaaagtyggtaattagt

SEQ ID NO: 13398 - DNA, 21 bp, Homo sapiens
aacacacacaygtatctgtct

SEQ ID NO: 13399 - DNA, 21 bp, Homo sapiens
aggagttaggyggaatgaaat

SEQ ID NO: 13400 - DNA, 21 bp, Homo sapiens
tgtccttccayggatacctga

SEQ ID NO: 13401 - DNA, 21 bp, Homo sapiens
caagcaagatraagcacatgg

SEQ ID NO: 13402 - DNA, 21 bp, Homo sapiens
ttccagcaggrccaacaaaac

SEQ ID NO: 13403 - DNA, 21 bp, Homo sapiens
tcacaaggaamtcccaatact

SEQ ID NO: 13404 - DNA, 21 bp, Homo sapiens
ccatatgtagyagagaaggga

SEQ ID NO: 13405 - DNA, 21 bp, Homo sapiens
tgtaatcacakcatttcaatg

SEQ ID NO: 13406 - DNA, 21 bp, Homo sapiens
aaacaataggygtttggagac

SEQ ID NO: 13407 - DNA, 21 bp, Homo sapiens
gatagttgtaytaatttacca

SEQ ID NO: 13408 - DNA, 21 bp, Homo sapiens
cgtgactgagyattctcactt

SEQ ID NO: 13409 - DNA, 21 bp, Homo sapiens
gtggaaatgartgagggactg

SEQ ID NO: 13410 - DNA, 21 bp, Homo sapiens
aactgggactyctcaggcatc

SEQ ID NO: 13411 - DNA, 21 bp, Homo sapiens
gtccttttgcyttttgctctt

SEQ ID NO: 13412 - DNA, 21 bp, Homo sapiens
caaagaatttrtaacctcaaa

SEQ ID NO: 13413 - DNA, 21 bp, Homo sapiens
ttataaagtaytgttttcatc

SEQ ID NO: 13414 - DNA, 21 bp, Homo sapiens
aagcatagtcrtgccacgttt

SEQ ID NO: 13415 - DNA, 21 bp, Homo sapiens
ttaaggtgccrtgattcccta

SEQ ID NO: 13416 - DNA, 21 bp, Homo sapiens
gagaatgcccyatttctatat

SEQ ID NO: 13417 - DNA, 21 bp, Homo sapiens
tttcctcatcmaaaaacttac

SEQ ID NO: 13418 - DNA, 21 bp, Homo sapiens
ctgatgcctcrgaaagaggaa

SEQ ID NO: 13419 - DNA, 21 bp, Homo sapiens
aagtttccaaytatgaggcca

SEQ ID NO: 13420 - DNA, 21 bp, Homo sapiens
caggttacagmccagagagcc

SEQ ID NO: 13421 - DNA, 21 bp, Homo sapiens
tagtgaggaayggtagttgat

SEQ ID NO: 13422 - DNA, 21 bp, Homo sapiens
ctgctcccctrtgtaaacttt

SEQ ID NO: 13423 - DNA, 21 bp, Homo sapiens
caggtaggacrcaaattttgg

SEQ ID NO: 13424 - DNA, 21 bp, Homo sapiens
tggatgaaaaygagggacagg

SEQ ID NO: 13425 - DNA, 21 bp, Homo sapiens
cctaccttacycagttcctgg

SEQ ID NO: 13426 - DNA, 21 bp, Homo sapiens
tcccaggcatrgaaaataata

SEQ ID NO: 13427 - DNA, 21 bp, Homo sapiens
atatctgcacrgtcagcggca

SEQ ID NO: 13428 - DNA, 21 bp, Homo sapiens
tcccttatttkgagtcaggac

SEQ ID NO: 13429 - DNA, 21 bp, Homo sapiens
tgtgtctgggyacattaacag

SEQ ID NO: 13430 - DNA, 21 bp, Homo sapiens
ggccttatggktatttggtgt

SEQ ID NO: 13431 - DNA, 21 bp, Homo sapiens
ttttttggctrtctattctgt

SEQ ID NO: 13432 - DNA, 21 bp, Homo sapiens
tatgacatatygttattaact

SEQ ID NO: 13433 - DNA, 21 bp, Homo sapiens
tctcctactayacttgtggat

SEQ ID NO: 13434 - DNA, 21 bp, Homo sapiens
catgcacgacmtatttgttga

SEQ ID NO: 13435 - DNA, 21 bp, Homo sapiens
agctgctcacrcagtgaattt

SEQ ID NO: 13436 - DNA, 21 bp, Homo sapiens
aataagcctgytccttcccca

SEQ ID NO: 13437 - DNA, 21 bp, Homo sapiens
tctattatcckatctattttg

SEQ ID NO: 13438 - DNA, 21 bp, Homo sapiens
ctggcagtgtrtgtcaccctg

SEQ ID NO: 13439 - DNA, 21 bp, Homo sapiens
attgccggaamcagaagtctt

SEQ ID NO: 13440 - DNA, 21 bp, Homo sapiens
gggtacgaatkatgagctact

SEQ ID NO: 13441 - DNA, 21 bp, Homo sapiens
tactaattgcrcttgcctggg

SEQ ID NO: 13442 - DNA, 21 bp, Homo sapiens
ttgagtaaaaytattcactca

SEQ ID NO: 13443 - DNA, 21 bp, Homo sapiens
tagccaaaatycatctcctgt

SEQ ID NO: 13444 - DNA, 21 bp, Homo sapiens
cccacaccccytcttgtacag

SEQ ID NO: 13445 - DNA, 21 bp, Homo sapiens
gttcatcttcmcagcctacct

SEQ ID NO: 13446 - DNA, 21 bp, Homo sapiens
gctacttctcygagccttagt

SEQ ID NO: 13447 - DNA, 21 bp, Homo sapiens
ccaccttatcrtttcccccta

SEQ ID NO: 13448 - DNA, 21 bp, Homo sapiens
taagaaggatmttttcctttg

SEQ ID NO: 13449 - DNA, 21 bp, Homo sapiens
tttttcctttytcaattacta

SEQ ID NO: 13450 - DNA, 21 bp, Homo sapiens
cacgtttcacrtcgctgatct

SEQ ID NO: 13451 - DNA, 21 bp, Homo sapiens
ggcccagctcytctcgtgcct

SEQ ID NO: 13452 - DNA, 21 bp, Homo sapiens
ctaactaactmactcctacag

SEQ ID NO: 13453 - DNA, 21 bp, Homo sapiens
ttctcattcaraggatctgct

SEQ ID NO: 13454 - DNA, 21 bp, Homo sapiens
atatggatagmcagtttgtgg

SEQ ID NO: 13455 - DNA, 21 bp, Homo sapiens
ccaagccaggktctccttcat

SEQ ID NO: 13456 - DNA, 21 bp, Homo sapiens
ctggcccagartctgttcttt

SEQ ID NO: 13457 - DNA, 21 bp, Homo sapiens
gacaaagaggktcaaacatct

SEQ ID NO: 13458 - DNA, 21 bp, Homo sapiens
tcagtcatagkcatccatgga

SEQ ID NO: 13459 - DNA, 21 bp, Homo sapiens
ctactacttaratccagccac

SEQ ID NO: 13460 - DNA, 21 bp, Homo sapiens
ggagcagcacytgcccaactt

SEQ ID NO: 13461 - DNA, 21 bp, Homo sapiens
ctgagcattckatatggtgtg

SEQ ID NO: 13462 - DNA, 21 bp, Homo sapiens
tacctaaggtygctcactcaa

SEQ ID NO: 13463 - DNA, 21 bp, Homo sapiens
gtggcctccargtgtttaagc

SEQ ID NO: 13464 - DNA, 21 bp, Homo sapiens
gaaccaaaaayggttatgttg

SEQ ID NO: 13465 - DNA, 21 bp, Homo sapiens
agcagaaaccygtagtagaca

SEQ ID NO: 13466 - DNA, 21 bp, Homo sapiens
gttggtcaaaytaataggtga

SEQ ID NO: 13467 - DNA, 21 bp, Homo sapiens
ctcacatcccratctccactc

SEQ ID NO: 13468 - DNA, 21 bp, Homo sapiens
gtgggcaaacrgagtcagctt

SEQ ID NO: 13469 - DNA, 21 bp, Homo sapiens
tggaaaaccayaactcagaac

SEQ ID NO: 13470 - DNA, 21 bp, Homo sapiens
cagttttctcyagagggactg

SEQ ID NO: 13471 - DNA, 21 bp, Homo sapiens
ggactgtcagrtcaaatcctc

SEQ ID NO: 13472 - DNA, 21 bp, Homo sapiens
attgtgctttyatccttcctc

SEQ ID NO: 13473 - DNA, 21 bp, Homo sapiens
ctggtttctgrggcaatagag

SEQ ID NO: 13474 - DNA, 21 bp, Homo sapiens
cacaacaggtkaggctgggac

SEQ ID NO: 13475 - DNA, 21 bp, Homo sapiens
gaaactgaacytcagagatgt

SEQ ID NO: 13476 - DNA, 21 bp, Homo sapiens
ctttttgcaaytccatttttt

SEQ ID NO: 13477 - DNA, 21 bp, Homo sapiens
agaatcctcayatctcactgc

SEQ ID NO: 13478 - DNA, 21 bp, Homo sapiens
ttagacccgtrtcttctgtta

SEQ ID NO: 13479 - DNA, 21 bp, Homo sapiens
tgtccagtgtrttgtctagag

SEQ ID NO: 13480 - DNA, 21 bp, Homo sapiens
ctcctttctcyctcctctcct

SEQ ID NO: 13481 - DNA, 21 bp, Homo sapiens
taagataaatmagataactac

SEQ ID NO: 13482 - DNA, 21 bp, Homo sapiens
gatataatccrtggagtggta

SEQ ID NO: 13483 - DNA, 21 bp, Homo sapiens
tcttctttctytcttcatccc

SEQ ID NO: 13484 - DNA, 21 bp, Homo sapiens
tgggggtgggygatgggggtg

SEQ ID NO: 13485 - DNA, 21 bp, Homo sapiens
atcctcacacrgcagagagag

SEQ ID NO: 13486 - DNA, 21 bp, Homo sapiens
gggctgtgttygcttggagag

SEQ ID NO: 13487 - DNA, 21 bp, Homo sapiens
aacccccttckgctgcccatg

SEQ ID NO: 13488 - DNA, 21 bp, Homo sapiens
accaactggcytctctgttca

SEQ ID NO: 13489 - DNA, 21 bp, Homo sapiens
gaaaaatcctrtattggaaaa

SEQ ID NO: 13490 - DNA, 21 bp, Homo sapiens
acaaaagtacrtactgtagta

SEQ ID NO: 13491 - DNA, 21 bp, Homo sapiens
catcttggagrcattaaagga

SEQ ID NO: 13492 - DNA, 21 bp, Homo sapiens
agggatgtcamtctggaagct

SEQ ID NO: 13493 - DNA, 21 bp, Homo sapiens
aactcacatgyacctgccaca

SEQ ID NO: 13494 - DNA, 21 bp, Homo sapiens
acttatcctgyctgttttcac

SEQ ID NO: 13495 - DNA, 21 bp, Homo sapiens
ctttttgaagyatacattagc

SEQ ID NO: 13496 - DNA, 21 bp, Homo sapiens
caccatccctyctgctatgac

SEQ ID NO: 13497 - DNA, 21 bp, Homo sapiens
atggactctcrttgaatagga

SEQ ID NO: 13498 - DNA, 21 bp, Homo sapiens
ttggttaaggraaaaataagg

SEQ ID NO: 13499 - DNA, 21 bp, Homo sapiens
gcactacaggmctttcctatt

SEQ ID NO: 13500 - DNA, 21 bp, Homo sapiens
ctctttggctyctacataaat

SEQ ID NO: 13501 - DNA, 21 bp, Homo sapiens
aaatgaagacktcaacatttt

SEQ ID NO: 13502 - DNA, 21 bp, Homo sapiens
tgcacgtgagkgaagacttac

SEQ ID NO: 13503 - DNA, 21 bp, Homo sapiens
aaaaaaaaacrcagatgagaa

SEQ ID NO: 13504 - DNA, 21 bp, Homo sapiens
ctggccatgayggcagcatag

SEQ ID NO: 13505 - DNA, 21 bp, Homo sapiens
agtttttcctyacctttgatt

SEQ ID NO: 13506 - DNA, 21 bp, Homo sapiens
ttttagactcytcttcatttt

SEQ ID NO: 13507 - DNA, 21 bp, Homo sapiens
ttgtgtggtcycttgaaagat

SEQ ID NO: 13508 - DNA, 21 bp, Homo sapiens
tttaggtaatrgtaccatttg

SEQ ID NO: 13509 - DNA, 21 bp, Homo sapiens
gggtatttggyatcgtgcatc

SEQ ID NO: 13510 - DNA, 21 bp, Homo sapiens
tgtatttatcrcttatactgt

SEQ ID NO: 13511 - DNA, 21 bp, Homo sapiens
tgtaagtgaarggacctcaga

SEQ ID NO: 13512 - DNA, 21 bp, Homo sapiens
ttaattcaaaycaagatgtaa

SEQ ID NO: 13513 - DNA, 21 bp, Homo sapiens
atttctataaygaaaaatagt

SEQ ID NO: 13514 - DNA, 21 bp, Homo sapiens
aaataagaggycacaaaaaat

SEQ ID NO: 13515 - DNA, 21 bp, Homo sapiens
tctttttcttmtacctttgat

SEQ ID NO: 13516 - DNA, 21 bp, Homo sapiens
ctgcttctgtrttgaacctat

SEQ ID NO: 13517 - DNA, 21 bp, Homo sapiens
tacttttaacygtgtggttag

SEQ ID NO: 13518 - DNA, 21 bp, Homo sapiens
gtttttggaargcttcagaag

SEQ ID NO: 13519 - DNA, 21 bp, Homo sapiens
acataaaagtycaacaatgtg

SEQ ID NO: 13520 - DNA, 21 bp, Homo sapiens
gttatagctgyacacaaggat

SEQ ID NO: 13521 - DNA, 21 bp, Homo sapiens
gtccacaaagrgttttcagcc

SEQ ID NO: 13522 - DNA, 21 bp, Homo sapiens
ctgtaaagtayattgaccgat

SEQ ID NO: 13523 - DNA, 21 bp, Homo sapiens
caaaatttgayaagatataga

SEQ ID NO: 13524 - DNA, 21 bp, Homo sapiens
tcaggttctgygttttatcct

SEQ ID NO: 13525 - DNA, 21 bp, Homo sapiens
ctgaggagagrcatgtcactc

SEQ ID NO: 13526 - DNA, 21 bp, Homo sapiens
catttttcatkaataaggcac

SEQ ID NO: 13527 - DNA, 21 bp, Homo sapiens
ggcaagagtckggaacagttg

SEQ ID NO: 13528 - DNA, 21 bp, Homo sapiens
tgttatcctcmttttgttttt

SEQ ID NO: 13529 - DNA, 21 bp, Homo sapiens
cacctctgttkgtgtgctggc

SEQ ID NO: 13530 - DNA, 21 bp, Homo sapiens
atgagtctttrtctttccaga

SEQ ID NO: 13531 - DNA, 21 bp, Homo sapiens
ccaggggatamcctggtctct

SEQ ID NO: 13532 - DNA, 21 bp, Homo sapiens
gcttaacaacytctcacctgt

SEQ ID NO: 13533 - DNA, 21 bp, Homo sapiens
aacaatttttygatttctcag

SEQ ID NO: 13534 - DNA, 21 bp, Homo sapiens
cacaggtatcytaccatattc

SEQ ID NO: 13535 - DNA, 21 bp, Homo sapiens
ttaaacatggyggtaagttcc

SEQ ID NO: 13536 - DNA, 21 bp, Homo sapiens
aatcaccagakgaaaagaggt

SEQ ID NO: 13537 - DNA, 21 bp, Homo sapiens
cactaattcayaggggcagca

SEQ ID NO: 13538 - DNA, 21 bp, Homo sapiens
aggcttggctytcaggtgtct

SEQ ID NO: 13539 - DNA, 21 bp, Homo sapiens
ctttcttggaytacaaacagg

SEQ ID NO: 13540 - DNA, 21 bp, Homo sapiens
aactcacagcragaatgagaa

SEQ ID NO: 13541 - DNA, 21 bp, Homo sapiens
ctccctagggycccctcccta

SEQ ID NO: 13542 - DNA, 21 bp, Homo sapiens
ctgaggtctakcaagatccat

SEQ ID NO: 13543 - DNA, 21 bp, Homo sapiens
gaggcaagatrtatgggtctg

SEQ ID NO: 13544 - DNA, 21 bp, Homo sapiens
ctccctctccytcacattgct

SEQ ID NO: 13545 - DNA, 21 bp, Homo sapiens
ccaaggcagtrtgccatgttg

SEQ ID NO: 13546 - DNA, 21 bp, Homo sapiens
aagatatgacraataggagga

SEQ ID NO: 13547 - DNA, 21 bp, Homo sapiens
agtctatagayaagtaataaa

SEQ ID NO: 13548 - DNA, 21 bp, Homo sapiens
attcataatgrtaagtaatgc

SEQ ID NO: 13549 - DNA, 21 bp, Homo sapiens
ggacaaagacrggtccctttg

SEQ ID NO: 13550 - DNA, 21 bp, Homo sapiens
cagtcataaaraaaaatgatg

SEQ ID NO: 13551 - DNA, 21 bp, Homo sapiens
tgagtctcctrtttattaact

SEQ ID NO: 13552 - DNA, 21 bp, Homo sapiens
gccatctcccrttcatattat

SEQ ID NO: 13553 - DNA, 21 bp, Homo sapiens
ctcaggtaagrgtgtctgttc

SEQ ID NO: 13554 - DNA, 21 bp, Homo sapiens
cagctctaacrtccttcgatc

SEQ ID NO: 13555 - DNA, 21 bp, Homo sapiens
actaggaaaaygtaagcccac

SEQ ID NO: 13556 - DNA, 21 bp, Homo sapiens
cctgtggccarcagccctgtg

SEQ ID NO: 13557 - DNA, 21 bp, Homo sapiens
agagaggatgrggaaggagac

SEQ ID NO: 13558 - DNA, 21 bp, Homo sapiens
gacacagatcmcaccactcga

SEQ ID NO: 13559 - DNA, 21 bp, Homo sapiens
cacaactcccrgtggacactt

SEQ ID NO: 13560 - DNA, 21 bp, Homo sapiens
taattccctgmtgggcttccc

SEQ ID NO: 13561 - DNA, 21 bp, Homo sapiens
atctcctgccrctgtgcctgc

SEQ ID NO: 13562 - DNA, 21 bp, Homo sapiens
aatccattttrttacttttta

SEQ ID NO: 13563 - DNA, 21 bp, Homo sapiens
aatttcacccygtaatttcgt

SEQ ID NO: 13564 - DNA, 21 bp, Homo sapiens
cacatgcatcycagattgcaa

SEQ ID NO: 13565 - DNA, 21 bp, Homo sapiens
tggggtccagmccacaggacc

SEQ ID NO: 13566 - DNA, 21 bp, Homo sapiens
cgaggcagcaytgaagacacg

SEQ ID NO: 13567 - DNA, 21 bp, Homo sapiens
acagattttgktatatgcggg

SEQ ID NO: 13568 - DNA, 21 bp, Homo sapiens
tctaatctggkttatgtcttc

SEQ ID NO: 13569 - DNA, 21 bp, Homo sapiens
agtgacaccayagaagagtga

SEQ ID NO: 13570 - DNA, 21 bp, Homo sapiens
gaatggttagrtatcagaaca

SEQ ID NO: 13571 - DNA, 21 bp, Homo sapiens
tcatacaggartgaaagggca

SEQ ID NO: 13572 - DNA, 21 bp, Homo sapiens
cctactttctygtctaggccc

SEQ ID NO: 13573 - DNA, 21 bp, Homo sapiens
cggacgtggakggcagctgga

SEQ ID NO: 13574 - DNA, 21 bp, Homo sapiens
gctggtacgcrgagtggagca

SEQ ID NO: 13575 - DNA, 21 bp, Homo sapiens
atactttctaygtggagttag

SEQ ID NO: 13576 - DNA, 21 bp, Homo sapiens
catccagcccrgtgggcggtt

SEQ ID NO: 13577 - DNA, 21 bp, Homo sapiens
actggcctggrccgtgctgat

SEQ ID NO: 13578 - DNA, 21 bp, Homo sapiens
gaagaaaaacytcttgggaca

SEQ ID NO: 13579 - DNA, 21 bp, Homo sapiens
tatttgtatgyccaccgccat

SEQ ID NO: 13580 - DNA, 21 bp, Homo sapiens
caccatgcccrgcattcaaca

SEQ ID NO: 13581 - DNA, 21 bp, Homo sapiens
tagtttccatyggagagagta

SEQ ID NO: 13582 - DNA, 21 bp, Homo sapiens
tcagtgatgcytgagtcaaga

SEQ ID NO: 13583 - DNA, 21 bp, Homo sapiens
gaggcaagccmttttgactca

SEQ ID NO: 13584 - DNA, 21 bp, Homo sapiens
actgaatattrcaaataaggg

SEQ ID NO: 13585 - DNA, 21 bp, Homo sapiens
cacgatagctytcttcccatt

SEQ ID NO: 13586 - DNA, 21 bp, Homo sapiens
taaagactctyggactgacag

SEQ ID NO: 13587 - DNA, 21 bp, Homo sapiens
aaagaacaacyacaatgggct

SEQ ID NO: 13588 - DNA, 21 bp, Homo sapiens
ggctgaatgaytttttcgaat

SEQ ID NO: 13589 - DNA, 21 bp, Homo sapiens
tagctttgaamcaagtactct

SEQ ID NO: 13590 - DNA, 21 bp, Homo sapiens
cctaactgttytcattaggtg

SEQ ID NO: 13591 - DNA, 21 bp, Homo sapiens
ctgaatgtacyagcaaagcta

SEQ ID NO: 13592 - DNA, 21 bp, Homo sapiens
cacaggtggtraggaagagag

SEQ ID NO: 13593 - DNA, 21 bp, Homo sapiens
agtcttttgarggaggtttcc

SEQ ID NO: 13594 - DNA, 21 bp, Homo sapiens
tcaagggtcayagtaattatt

SEQ ID NO: 13595 - DNA, 21 bp, Homo sapiens
ggactcaaaaytaaatctctc

SEQ ID NO: 13596 - DNA, 21 bp, Homo sapiens
tatttagtcarcactgacttc

SEQ ID NO: 13597 - DNA, 21 bp, Homo sapiens
ctggcttcaamaacagagggg

SEQ ID NO: 13598 - DNA, 21 bp, Homo sapiens
ctgtctctaamctctctgtat

SEQ ID NO: 13599 - DNA, 21 bp, Homo sapiens
aggttcatggrctaagatagt

SEQ ID NO: 13600 - DNA, 21 bp, Homo sapiens
gagagaaaagrcatgaacaga

SEQ ID NO: 13601 - DNA, 21 bp, Homo sapiens
ggactcaaccracggagatac

SEQ ID NO: 13602 - DNA, 21 bp, Homo sapiens
cttaaaaaatkctcaggtgtt

SEQ ID NO: 13603 - DNA, 21 bp, Homo sapiens
gaaactaatgracctaggaat

SEQ ID NO: 13604 - DNA, 21 bp, Homo sapiens
atctgctgtgracaccgccaa

SEQ ID NO: 13605 - DNA, 21 bp, Homo sapiens
taaacttattraaacataaaa

SEQ ID NO: 13606 - DNA, 21 bp, Homo sapiens
ctacggattgrataaagaaaa

SEQ ID NO: 13607 - DNA, 21 bp, Homo sapiens
cttcgtgtackccctccttcg

SEQ ID NO: 13608 - DNA, 21 bp, Homo sapiens
gttgccatccrtctacatgca

SEQ ID NO: 13609 - DNA, 21 bp, Homo sapiens
tcgattctcayagggaatgag

SEQ ID NO: 13610 - DNA, 21 bp, Homo sapiens
agttggtgtargagcttgggg

SEQ ID NO: 13611 - DNA, 21 bp, Homo sapiens
actacaatgayatttttcctc

SEQ ID NO: 13612 - DNA, 21 bp, Homo sapiens
tcttccacacrtcctcttctt

SEQ ID NO: 13613 - DNA, 21 bp, Homo sapiens
ggaaacagaaytagaagaagt

SEQ ID NO: 13614 - DNA, 21 bp, Homo sapiens
taaccttttcrtagcccacaa

SEQ ID NO: 13615 - DNA, 21 bp, Homo sapiens
cagtggagccrgaaatcatta

SEQ ID NO: 13616 - DNA, 21 bp, Homo sapiens
atatgtgtgcrttgaaaagtt

SEQ ID NO: 13617 - DNA, 21 bp, Homo sapiens
tagtctaggtrtggaatttca

SEQ ID NO: 13618 - DNA, 21 bp, Homo sapiens
aagtacatacrcactggttgg

SEQ ID NO: 13619 - DNA, 21 bp, Homo sapiens
atttattcatkctttcttctc

SEQ ID NO: 13620 - DNA, 21 bp, Homo sapiens
atttgaattgytttatccaaa

SEQ ID NO: 13621 - DNA, 21 bp, Homo sapiens
acttgataatrtatgacagga

SEQ ID NO: 13622 - DNA, 21 bp, Homo sapiens
cttgcagggcrcaagccaaag

SEQ ID NO: 13623 - DNA, 21 bp, Homo sapiens
cttggccttcytcctcacagt

SEQ ID NO: 13624 - DNA, 21 bp, Homo sapiens
cgacatctgartcacctgtgg

SEQ ID NO: 13625 - DNA, 21 bp, Homo sapiens
cactttggttkagatcctcat

SEQ ID NO: 13626 - DNA, 21 bp, Homo sapiens
gcctgagataktatttctctg

SEQ ID NO: 13627 - DNA, 21 bp, Homo sapiens
tgtggtatatygcctaaagta

SEQ ID NO: 13628 - DNA, 21 bp, Homo sapiens
tggtagaacaygggcctcaga

SEQ ID NO: 13629 - DNA, 21 bp, Homo sapiens
agaatcataarcaggttatct

SEQ ID NO: 13630 - DNA, 21 bp, Homo sapiens
ttgagttttargggttttttg

SEQ ID NO: 13631 - DNA, 21 bp, Homo sapiens
cgcactatggrgcagttcaca

SEQ ID NO: 13632 - DNA, 21 bp, Homo sapiens
ctgctctgctraagtccacag

SEQ ID NO: 13633 - DNA, 21 bp, Homo sapiens
attcattctayagtctcatca

SEQ ID NO: 13634 - DNA, 21 bp, Homo sapiens
tcttaacatcytttttttcca

SEQ ID NO: 13635 - DNA, 21 bp, Homo sapiens
gcctgaactaygtatgaagga

SEQ ID NO: 13636 - DNA, 21 bp, Homo sapiens
attccagcggraatccatcat

SEQ ID NO: 13637 - DNA, 21 bp, Homo sapiens
gttcacattcrgcagagataa

SEQ ID NO: 13638 - DNA, 21 bp, Homo sapiens
tttgatgcaayggtcttagtg

SEQ ID NO: 13639 - DNA, 21 bp, Homo sapiens
ttctaacccayggcttaccac

SEQ ID NO: 13640 - DNA, 21 bp, Homo sapiens
agaacccttgygaggatctct

SEQ ID NO: 13641 - DNA, 21 bp, Homo sapiens
tgtctcactcyttctcttcct

SEQ ID NO: 13642 - DNA, 21 bp, Homo sapiens
acttcaacctraaccctctct

SEQ ID NO: 13643 - DNA, 21 bp, Homo sapiens
ttttcaaaccratatttaaaa

SEQ ID NO: 13644 - DNA, 21 bp, Homo sapiens
agtgacctcayttgatatgga

SEQ ID NO: 13645 - DNA, 21 bp, Homo sapiens
ccctatcccayagatactgta

SEQ ID NO: 13646 - DNA, 21 bp, Homo sapiens
tagatgcagcrgggctacacg

SEQ ID NO: 13647 - DNA, 21 bp, Homo sapiens
agagtagctaycttattcaga

SEQ ID NO: 13648 - DNA, 21 bp, Homo sapiens
tatttatgatktacaacatgt

SEQ ID NO: 13649 - DNA, 21 bp, Homo sapiens
gtagagattgygctaatttgc

SEQ ID NO: 13650 - DNA, 21 bp, Homo sapiens
aatgtagatakgaaagtacaa

SEQ ID NO: 13651 - DNA, 21 bp, Homo sapiens
tatttaccacratcaaactta

SEQ ID NO: 13652 - DNA, 21 bp, Homo sapiens
cctgagaggaygttcaatcaa

SEQ ID NO: 13653 - DNA, 21 bp, Homo sapiens
caaaaaaatarttgctgagtc

SEQ ID NO: 13654 - DNA, 21 bp, Homo sapiens
gccaggtattrtggaaggcac

SEQ ID NO: 13655 - DNA, 21 bp, Homo sapiens
gaagagagaartctattttct

SEQ ID NO: 13656 - DNA, 21 bp, Homo sapiens
acacaggaaarctaaaaggtg

SEQ ID NO: 13657 - DNA, 21 bp, Homo sapiens
ggccagtcttygaatatatgt

SEQ ID NO: 13658 - DNA, 21 bp, Homo sapiens
ttgcagaagaraacagaacaa

SEQ ID NO: 13659 - DNA, 21 bp, Homo sapiens
acatcgagacyaggaaataga

SEQ ID NO: 13660 - DNA, 21 bp, Homo sapiens
tctccattgtytttactgggc

SEQ ID NO: 13661 - DNA, 21 bp, Homo sapiens
ctatgccaatygcattcttcc

SEQ ID NO: 13662 - DNA, 21 bp, Homo sapiens
aaagtcattcrtggtcgggtg

SEQ ID NO: 13663 - DNA, 21 bp, Homo sapiens
ataaataaatmaatcaataaa

SEQ ID NO: 13664 - DNA, 21 bp, Homo sapiens
agcatgcaacyctctctccta

SEQ ID NO: 13665 - DNA, 21 bp, Homo sapiens
taaggaaactytctatctgga

SEQ ID NO: 13666 - DNA, 21 bp, Homo sapiens
ctttggggtgrgagaagtttc

SEQ ID NO: 13667 - DNA, 21 bp, Homo sapiens
ttgctaagagyggccaggtca

SEQ ID NO: 13668 - DNA, 21 bp, Homo sapiens
tcctgcataaraccactgcgc

SEQ ID NO: 13669 - DNA, 21 bp, Homo sapiens
gactgcttttrtttatgtatt

SEQ ID NO: 13670 - DNA, 21 bp, Homo sapiens
gaccatctcargacatcgatc

SEQ ID NO: 13671 - DNA, 21 bp, Homo sapiens
ttagaaatatrtttaggtggt

SEQ ID NO: 13672 - DNA, 21 bp, Homo sapiens
agatccaatckgttttaaccc

SEQ ID NO: 13673 - DNA, 21 bp, Homo sapiens
aacattgttcragtctttatc

SEQ ID NO: 13674 - DNA, 21 bp, Homo sapiens
tagagaaatgyccccagtcct

SEQ ID NO: 13675 - DNA, 21 bp, Homo sapiens
aatgcttagaygaatcattat

SEQ ID NO: 13676 - DNA, 21 bp, Homo sapiens
tgggcatccaygaatagctgg

SEQ ID NO: 13677 - DNA, 21 bp, Homo sapiens
ggacagcagcyttaatgttcc

SEQ ID NO: 13678 - DNA, 21 bp, Homo sapiens
aagagctgacratatttttaa

SEQ ID NO: 13679 - DNA, 21 bp, Homo sapiens
aacagcaaacrtgattgagca

SEQ ID NO: 13680 - DNA, 21 bp, Homo sapiens
gtgttgaaaayggtcccctca

SEQ ID NO: 13681 - DNA, 21 bp, Homo sapiens
actgggagatygctatctagg

SEQ ID NO: 13682 - DNA, 21 bp, Homo sapiens
ggcagaagtcrcagggcccca

SEQ ID NO: 13683 - DNA, 21 bp, Homo sapiens
cacaatgtgtktcaagggctg

SEQ ID NO: 13684 - DNA, 21 bp, Homo sapiens
tgtgcacgtgrgtctttatcc

SEQ ID NO: 13685 - DNA, 21 bp, Homo sapiens
atctaagtacrtgaattacat

SEQ ID NO: 13686 - DNA, 21 bp, Homo sapiens
acctctgcctktaggtgcagc

SEQ ID NO: 13687 - DNA, 21 bp, Homo sapiens
cttgggctgcrgttcagatat

SEQ ID NO: 13688 - DNA, 21 bp, Homo sapiens
agggcactgcyggaaatggag

SEQ ID NO: 13689 - DNA, 21 bp, Homo sapiens
ctagcacatargaggtgctac

SEQ ID NO: 13690 - DNA, 21 bp, Homo sapiens
gcagattaatygaaggaggtc

SEQ ID NO: 13691 - DNA, 21 bp, Homo sapiens
ggctcttctcygcgctacctg

SEQ ID NO: 13692 - DNA, 21 bp, Homo sapiens
cttctgttggytgcttcctga

SEQ ID NO: 13693 - DNA, 21 bp, Homo sapiens
caacaaagctyataggagata

SEQ ID NO: 13694 - DNA, 21 bp, Homo sapiens
catgtccttamtgtgatttcc

SEQ ID NO: 13695 - DNA, 21 bp, Homo sapiens
aatatcttagyctaatttcac

SEQ ID NO: 13696 - DNA, 21 bp, Homo sapiens
cagaaaacgtmggcttcagaa

SEQ ID NO: 13697 - DNA, 21 bp, Homo sapiens
cgcttgacatmctttctcact

SEQ ID NO: 13698 - DNA, 21 bp, Homo sapiens
gacttacaaaygacatttaca

SEQ ID NO: 13699 - DNA, 21 bp, Homo sapiens
aaaaggaatgygatacttggc

SEQ ID NO: 13700 - DNA, 21 bp, Homo sapiens
aatgcatctgyggcacgtttt

SEQ ID NO: 13701 - DNA, 21 bp, Homo sapiens
atctgtatcayagtggagaga

SEQ ID NO: 13702 - DNA, 21 bp, Homo sapiens
cagctgagatkagaagtagcc

SEQ ID NO: 13703 - DNA, 21 bp, Homo sapiens
tagttctgttyttccttgttc

SEQ ID NO: 13704 - DNA, 21 bp, Homo sapiens
ttgagtcctcrtgggagctta

SEQ ID NO: 13705 - DNA, 21 bp, Homo sapiens
ctgctcctgcygcacttagga

SEQ ID NO: 13706 - DNA, 21 bp, Homo sapiens
attgcagagcrtggaatcctt

SEQ ID NO: 13707 - DNA, 21 bp, Homo sapiens
gaattaaccayagctgcatgc

SEQ ID NO: 13708 - DNA, 21 bp, Homo sapiens
cgtcttctgartgtcttgagg

SEQ ID NO: 13709 - DNA, 21 bp, Homo sapiens
aagaggatttragaagcctag

SEQ ID NO: 13710 - DNA, 21 bp, Homo sapiens
ttaaccatgamgccttgagtt

SEQ ID NO: 13711 - DNA, 21 bp, Homo sapiens
cttttgttgcyccactgcagt

SEQ ID NO: 13712 - DNA, 21 bp, Homo sapiens
gccagcccccrtgcctccatc

SEQ ID NO: 13713 - DNA, 21 bp, Homo sapiens
tgttgaacatraatcacaagg

SEQ ID NO: 13714 - DNA, 21 bp, Homo sapiens
agcctacctgkctgggcctct

SEQ ID NO: 13715 - DNA, 21 bp, Homo sapiens
tttctgggcaygcagagtaca

SEQ ID NO: 13716 - DNA, 21 bp, Homo sapiens
tctcaacactmcatctctaat

SEQ ID NO: 13717 - DNA, 21 bp, Homo sapiens
tcactttattygaggaaatcc

SEQ ID NO: 13718 - DNA, 21 bp, Homo sapiens
gagaaggaatyggtcccagcc

SEQ ID NO: 13719 - DNA, 21 bp, Homo sapiens
ttccaagggtkgaaactgtac

SEQ ID NO: 13720 - DNA, 21 bp, Homo sapiens
gtggttggtgygcaggccagg

SEQ ID NO: 13721 - DNA, 21 bp, Homo sapiens
gggcccttctmactctcacat

SEQ ID NO: 13722 - DNA, 21 bp, Homo sapiens
cacatacaaaygtattggcta

SEQ ID NO: 13723 - DNA, 21 bp, Homo sapiens
cttttggaatytgttgagcct

SEQ ID NO: 13724 - DNA, 21 bp, Homo sapiens
ttgtatttgcytcttcttaat

SEQ ID NO: 13725 - DNA, 21 bp, Homo sapiens
cttttccaccmttagctgaga

SEQ ID NO: 13726 - DNA, 21 bp, Homo sapiens
ggccatgttcyccctggatcc

SEQ ID NO: 13727 - DNA, 21 bp, Homo sapiens
accactttccygcaggcactg

SEQ ID NO: 13728 - DNA, 21 bp, Homo sapiens
cagggttgctrgaccttcaca

SEQ ID NO: 13729 - DNA, 21 bp, Homo sapiens
atttaaatcaygcagttttat

SEQ ID NO: 13730 - DNA, 21 bp, Homo sapiens
tctggaatatragagctccaa

SEQ ID NO: 13731 - DNA, 21 bp, Homo sapiens
cattaagtgcmatcacagagg

SEQ ID NO: 13732 - DNA, 21 bp, Homo sapiens
cgcggcaggakatggttccag

SEQ ID NO: 13733 - DNA, 21 bp, Homo sapiens
tctctcttggytctgctttgc

SEQ ID NO: 13734 - DNA, 21 bp, Homo sapiens
ggagtcagggytgggaaacag

SEQ ID NO: 13735 - DNA, 21 bp, Homo sapiens
gttgccctagyggttcttgga

SEQ ID NO: 13736 - DNA, 21 bp, Homo sapiens
aatgaaccaakgaatactgga

SEQ ID NO: 13737 - DNA, 21 bp, Homo sapiens
tgattcatccrgttaaatgaa

SEQ ID NO: 13738 - DNA, 21 bp, Homo sapiens
gaaggacttgrgtgagtcaca

SEQ ID NO: 13739 - DNA, 21 bp, Homo sapiens
taactgcatgytcctccgtac

SEQ ID NO: 13740 - DNA, 21 bp, Homo sapiens
aatgagtctgyattttaaaca

SEQ ID NO: 13741 - DNA, 21 bp, Homo sapiens
gagatgtaaamtggagaatga

SEQ ID NO: 13742 - DNA, 21 bp, Homo sapiens
aacgtgtagcrctataaataa

SEQ ID NO: 13743 - DNA, 21 bp, Homo sapiens
ttttcagggcyctcggggaga

SEQ ID NO: 13744 - DNA, 21 bp, Homo sapiens
taaagaatacyattttttcca

SEQ ID NO: 13745 - DNA, 21 bp, Homo sapiens
ttgctaacacyttaatcttga

SEQ ID NO: 13746 - DNA, 21 bp, Homo sapiens
agggcaaagaraacatttaaa

SEQ ID NO: 13747 - DNA, 21 bp, Homo sapiens
aaaaatgctaytcctaaaaaa

SEQ ID NO: 13748 - DNA, 21 bp, Homo sapiens
taaactgcaayatatgctgga

SEQ ID NO: 13749 - DNA, 21 bp, Homo sapiens
tgggatctcgkactacatttg

SEQ ID NO: 13750 - DNA, 21 bp, Homo sapiens
ctcaaagaacytaaatgactg

SEQ ID NO: 13751 - DNA, 21 bp, Homo sapiens
ttagcaaaaaygcttaaaaat

SEQ ID NO: 13752 - DNA, 21 bp, Homo sapiens
acatctatgcraagacagccc

SEQ ID NO: 13753 - DNA, 21 bp, Homo sapiens
gtctcatcagyaaagtgccca

SEQ ID NO: 13754 - DNA, 21 bp, Homo sapiens
ttactagattrtgggcagcac

SEQ ID NO: 13755 - DNA, 21 bp, Homo sapiens
ggtggacaacrttgggcaaat

SEQ ID NO: 13756 - DNA, 21 bp, Homo sapiens
tactatttatygaaaagactc

SEQ ID NO: 13757 - DNA, 21 bp, Homo sapiens
gcggatgcacrccttcattac

SEQ ID NO: 13758 - DNA, 21 bp, Homo sapiens
gtgggagaccygaccacttca

SEQ ID NO: 13759 - DNA, 21 bp, Homo sapiens
gtagtcaataraagggtaatt

SEQ ID NO: 13760 - DNA, 21 bp, Homo sapiens
gttcttgactytcagctttgg

SEQ ID NO: 13761 - DNA, 21 bp, Homo sapiens
gttgcttgttyagaccttttc

SEQ ID NO: 13762 - DNA, 21 bp, Homo sapiens
acctgtgtgcrtggaacccaa

SEQ ID NO: 13763 - DNA, 21 bp, Homo sapiens
aatgggacacrctgcaccaat

SEQ ID NO: 13764 - DNA, 21 bp, Homo sapiens
aagctctacartgctttccta

SEQ ID NO: 13765 - DNA, 21 bp, Homo sapiens
gggtccagtartgttttcagt

SEQ ID NO: 13766 - DNA, 21 bp, Homo sapiens
ccacaaaactrggagtttttt

SEQ ID NO: 13767 - DNA, 21 bp, Homo sapiens
gcttatatacmcccaaatcct

SEQ ID NO: 13768 - DNA, 21 bp, Homo sapiens
ctttctacacrtctgctctat

SEQ ID NO: 13769 - DNA, 21 bp, Homo sapiens
tttgtcttgcytactttccta

SEQ ID NO: 13770 - DNA, 21 bp, Homo sapiens
agacttatctyggttatagca

SEQ ID NO: 13771 - DNA, 21 bp, Homo sapiens
tcatatcttarctctaaggtc

SEQ ID NO: 13772 - DNA, 21 bp, Homo sapiens
taacttctttrttttcaatag

SEQ ID NO: 13773 - DNA, 21 bp, Homo sapiens
acagcagaccrtaactgatag

SEQ ID NO: 13774 - DNA, 21 bp, Homo sapiens
ttacctagatygggtaatatt

SEQ ID NO: 13775 - DNA, 21 bp, Homo sapiens
gggtcactttyattcctggct

SEQ ID NO: 13776 - DNA, 21 bp, Homo sapiens
tgctgaagttrgttgatagtg

SEQ ID NO: 13777 - DNA, 21 bp, Homo sapiens
ttatatttgaygttgctgtta

SEQ ID NO: 13778 - DNA, 21 bp, Homo sapiens
ttttaactagrgtcttctggt

SEQ ID NO: 13779 - DNA, 21 bp, Homo sapiens
gtgaaactatraggaaatgtg

SEQ ID NO: 13780 - DNA, 21 bp, Homo sapiens
ttcagtaaaayagtcattgaa

SEQ ID NO: 13781 - DNA, 21 bp, Homo sapiens
agcaccagaartggctaaaac

SEQ ID NO: 13782 - DNA, 21 bp, Homo sapiens
tgtcatgtcarggcagcgata

SEQ ID NO: 13783 - DNA, 21 bp, Homo sapiens
taactaaaaaygcagcatacc

SEQ ID NO: 13784 - DNA, 21 bp, Homo sapiens
tctctccagtracaaataatt

SEQ ID NO: 13785 - DNA, 21 bp, Homo sapiens
tccaatgttcrtgtatcttat

SEQ ID NO: 13786 - DNA, 21 bp, Homo sapiens
agtatataaarcgaaacatag

SEQ ID NO: 13787 - DNA, 21 bp, Homo sapiens
tgggctagtgycttctatgcc

SEQ ID NO: 13788 - DNA, 21 bp, Homo sapiens
ccagagacaaygtgacgaagc

SEQ ID NO: 13789 - DNA, 21 bp, Homo sapiens
aagcaggaaayagggtattga

SEQ ID NO: 13790 - DNA, 21 bp, Homo sapiens
aagtgaggtamtgaatggaca

SEQ ID NO: 13791 - DNA, 21 bp, Homo sapiens
taagtgtattktgtttaaaat

SEQ ID NO: 13792 - DNA, 21 bp, Homo sapiens
aaaaaagtctytgtataaagt

SEQ ID NO: 13793 - DNA, 21 bp, Homo sapiens
cacagacccaytgaagaatca

SEQ ID NO: 13794 - DNA, 21 bp, Homo sapiens
tcactggggtkctacatatgt

SEQ ID NO: 13795 - DNA, 21 bp, Homo sapiens
gcaggtgttarttgtgattat

SEQ ID NO: 13796 - DNA, 21 bp, Homo sapiens
tgggaagcccraggtcaaggc

SEQ ID NO: 13797 - DNA, 21 bp, Homo sapiens
aagatacacaytgtctggctc

SEQ ID NO: 13798 - DNA, 21 bp, Homo sapiens
gacagcataaragaggtgtta

SEQ ID NO: 13799 - DNA, 21 bp, Homo sapiens
ttgcagattartgacaaataa

SEQ ID NO: 13800 - DNA, 21 bp, Homo sapiens
aaaccaatctmtttaattaag

SEQ ID NO: 13801 - DNA, 21 bp, Homo sapiens
gtgtagttacrtgaacagtgg

SEQ ID NO: 13802 - DNA, 21 bp, Homo sapiens
attattgctgygcatttctct

SEQ ID NO: 13803 - DNA, 21 bp, Homo sapiens
attttataaaygggcccaaat

SEQ ID NO: 13804 - DNA, 21 bp, Homo sapiens
attttcaaaaygacaggaatg

SEQ ID NO: 13805 - DNA, 21 bp, Homo sapiens
ataattcaccrtaaggggaaa

SEQ ID NO: 13806 - DNA, 21 bp, Homo sapiens
aggactctgaygtataatggt

SEQ ID NO: 13807 - DNA, 21 bp, Homo sapiens
ttggtattaarttactcatgc

SEQ ID NO: 13808 - DNA, 21 bp, Homo sapiens
taaaaaattayagcagtcatc

SEQ ID NO: 13809 - DNA, 21 bp, Homo sapiens
acattaatgcmattgaagccc

SEQ ID NO: 13810 - DNA, 21 bp, Homo sapiens
tatatgcattyccaaatgaaa

SEQ ID NO: 13811 - DNA, 21 bp, Homo sapiens
tctgtaatcartggccaatag

SEQ ID NO: 13812 - DNA, 21 bp, Homo sapiens
gttctcatgcrcagtatttgt

SEQ ID NO: 13813 - DNA, 21 bp, Homo sapiens
gactggggtaygaaaaaaaaa

SEQ ID NO: 13814 - DNA, 21 bp, Homo sapiens
attaagatctrtagtaaatca

SEQ ID NO: 13815 - DNA, 21 bp, Homo sapiens
aaccacagatyattgggcccc

SEQ ID NO: 13816 - DNA, 21 bp, Homo sapiens
aattttgttgrtgggtgaaga

SEQ ID NO: 13817 - DNA, 21 bp, Homo sapiens
tatgtcctggkcactgttcta

SEQ ID NO: 13818 - DNA, 21 bp, Homo sapiens
taagtttgtaytaccttccaa

SEQ ID NO: 13819 - DNA, 21 bp, Homo sapiens
aactctagaaraggcaaatta

SEQ ID NO: 13820 - DNA, 21 bp, Homo sapiens
ttataggcaayggcacagaac

SEQ ID NO: 13821 - DNA, 21 bp, Homo sapiens
ctaggcatccyattaaaagaa

SEQ ID NO: 13822 - DNA, 21 bp, Homo sapiens
tcttggacatrttaggttcct

SEQ ID NO: 13823 - DNA, 21 bp, Homo sapiens
aagcacaaagktacccaggac

SEQ ID NO: 13824 - DNA, 21 bp, Homo sapiens
tagctaatggmttcactccca

SEQ ID NO: 13825 - DNA, 21 bp, Homo sapiens
ttagccctcaycagcttttct

SEQ ID NO: 13826 - DNA, 21 bp, Homo sapiens
tacactctgtygcaaagaaaa

SEQ ID NO: 13827 - DNA, 21 bp, Homo sapiens
ttcatgataamtcatggaacc

SEQ ID NO: 13828 - DNA, 21 bp, Homo sapiens
caggtccttgytgatgaggcc

SEQ ID NO: 13829 - DNA, 21 bp, Homo sapiens
agcccttatcrgttatggcaa

SEQ ID NO: 13830 - DNA, 21 bp, Homo sapiens
atgcacaccakgggctggacc

SEQ ID NO: 13831 - DNA, 21 bp, Homo sapiens
ttccaatctcrttgcccatga

SEQ ID NO: 13832 - DNA, 21 bp, Homo sapiens
gcttgagtgtrtcttgtctct

SEQ ID NO: 13833 - DNA, 21 bp, Homo sapiens
ctggagtcccrgagtggtctg

SEQ ID NO: 13834 - DNA, 21 bp, Homo sapiens
acaattaaatrtactccaaag

SEQ ID NO: 13835 - DNA, 21 bp, Homo sapiens
ggtggggggcyagattagaac

SEQ ID NO: 13836 - DNA, 21 bp, Homo sapiens
caatgcactgrggttaagtct

SEQ ID NO: 13837 - DNA, 21 bp, Homo sapiens
gctgatacacmatgttttaat

SEQ ID NO: 13838 - DNA, 21 bp, Homo sapiens
tgttaactaayggttcaaatt

SEQ ID NO: 13839 - DNA, 21 bp, Homo sapiens
atcttggcaargaaaacagtt

SEQ ID NO: 13840 - DNA, 21 bp, Homo sapiens
tgtgcctaccrtatcaaagtc

SEQ ID NO: 13841 - DNA, 21 bp, Homo sapiens
ttttttttcckatgtagtgaa

SEQ ID NO: 13842 - DNA, 21 bp, Homo sapiens
gtggagcggtrtgtactacag

SEQ ID NO: 13843 - DNA, 21 bp, Homo sapiens
tccatttccayagagagtttc

SEQ ID NO: 13844 - DNA, 21 bp, Homo sapiens
cgccgttcttmcgttatcttc

SEQ ID NO: 13845 - DNA, 21 bp, Homo sapiens
ggagttgtttygagggttcat

SEQ ID NO: 13846 - DNA, 21 bp, Homo sapiens
agggtatgatmgtgctgtgcc

SEQ ID NO: 13847 - DNA, 21 bp, Homo sapiens
gaaaagcatgktgtcctgatt

SEQ ID NO: 13848 - DNA, 21 bp, Homo sapiens
ctgaggtagakgctggggtta

SEQ ID NO: 13849 - DNA, 21 bp, Homo sapiens
catactgtctrcctgaggcac

SEQ ID NO: 13850 - DNA, 21 bp, Homo sapiens
tgctgctagtygcagcaggtg

SEQ ID NO: 13851 - DNA, 21 bp, Homo sapiens
gggatagaaaragacacaatc

SEQ ID NO: 13852 - DNA, 21 bp, Homo sapiens
tcaaatacccytttctccttg

SEQ ID NO: 13853 - DNA, 21 bp, Homo sapiens
atttccatttmtataaaaccc

SEQ ID NO: 13854 - DNA, 21 bp, Homo sapiens
aaaacaaacaraagtaaacag

SEQ ID NO: 13855 - DNA, 21 bp, Homo sapiens
tcatgcccacmgatactttaa

SEQ ID NO: 13856 - DNA, 21 bp, Homo sapiens
cagtgggaaargggtcccgga

SEQ ID NO: 13857 - DNA, 21 bp, Homo sapiens
ttctaggaggmgaaaatttgg

SEQ ID NO: 13858 - DNA, 21 bp, Homo sapiens
ttctggctgtrctacttacta

SEQ ID NO: 13859 - DNA, 21 bp, Homo sapiens
ccacacagcargcttgggaag

SEQ ID NO: 13860 - DNA, 21 bp, Homo sapiens
tgggcagtgcrtcacagatgc

SEQ ID NO: 13861 - DNA, 21 bp, Homo sapiens
gctcatcactrtttaacccac

SEQ ID NO: 13862 - DNA, 21 bp, Homo sapiens
catactccagycaggcccagt

SEQ ID NO: 13863 - DNA, 21 bp, Homo sapiens
agcctgtagcrtctgagtctt

SEQ ID NO: 13864 - DNA, 21 bp, Homo sapiens
attcaggacarggtgttcaca

SEQ ID NO: 13865 - DNA, 21 bp, Homo sapiens
atccgaggtgkcacatatgat

SEQ ID NO: 13866 - DNA, 21 bp, Homo sapiens
aaattcttccmttttagaaat

SEQ ID NO: 13867 - DNA, 21 bp, Homo sapiens
taccatggtargcacaggtgt

SEQ ID NO: 13868 - DNA, 21 bp, Homo sapiens
ggattttacartctctccctt

SEQ ID NO: 13869 - DNA, 21 bp, Homo sapiens
tgctgaaaatkaaattctggt

SEQ ID NO: 13870 - DNA, 21 bp, Homo sapiens
aagtgactttratgattatac

SEQ ID NO: 13871 - DNA, 21 bp, Homo sapiens
ggtttgttctrattcccttcc

SEQ ID NO: 13872 - DNA, 21 bp, Homo sapiens
cccataaattytgcattgcat

SEQ ID NO: 13873 - DNA, 21 bp, Homo sapiens
tcccttattcyttgagcagct

SEQ ID NO: 13874 - DNA, 21 bp, Homo sapiens
aagtttaagayctctatttgt

SEQ ID NO: 13875 - DNA, 21 bp, Homo sapiens
ataattcatcyagattggtga

SEQ ID NO: 13876 - DNA, 21 bp, Homo sapiens
cacggtcataragaccacaat

SEQ ID NO: 13877 - DNA, 21 bp, Homo sapiens
gtttaataatrtctggtattg

SEQ ID NO: 13878 - DNA, 21 bp, Homo sapiens
aaagtgtgacrtgccaaacta

SEQ ID NO: 13879 - DNA, 21 bp, Homo sapiens
aaaatagaagkagggataatt

SEQ ID NO: 13880 - DNA, 21 bp, Homo sapiens
gtggtatctarcaacagcggc

SEQ ID NO: 13881 - DNA, 21 bp, Homo sapiens
agtacagtacmtacaactgtg

SEQ ID NO: 13882 - DNA, 21 bp, Homo sapiens
caaacttctamgtctcatgac

SEQ ID NO: 13883 - DNA, 21 bp, Homo sapiens
aaattttccayagaaagaagt

SEQ ID NO: 13884 - DNA, 21 bp, Homo sapiens
aataaaacaaygtttgatagg

SEQ ID NO: 13885 - DNA, 21 bp, Homo sapiens
cggcagagcartcatcttgag

SEQ ID NO: 13886 - DNA, 21 bp, Homo sapiens
atgagccaggygttttgagca

SEQ ID NO: 13887 - DNA, 21 bp, Homo sapiens
ccttgctgcaygccacagtga

SEQ ID NO: 13888 - DNA, 21 bp, Homo sapiens
ttggagttacytttgataaga

SEQ ID NO: 13889 - DNA, 21 bp, Homo sapiens
cgtagaaccartaatatagat

SEQ ID NO: 13890 - DNA, 21 bp, Homo sapiens
aggtttagaamggcagctctt

SEQ ID NO: 13891 - DNA, 21 bp, Homo sapiens
actttaaacartgttaacatt

SEQ ID NO: 13892 - DNA, 21 bp, Homo sapiens
gtacagcagckaattttcttc

SEQ ID NO: 13893 - DNA, 21 bp, Homo sapiens
gatggtcattytgagtagtaa

SEQ ID NO: 13894 - DNA, 21 bp, Homo sapiens
agggaaaaccygtctctacaa

SEQ ID NO: 13895 - DNA, 21 bp, Homo sapiens
ctgagataagraaaggctttg

SEQ ID NO: 13896 - DNA, 21 bp, Homo sapiens
taaggggtgayaccatgtagg

SEQ ID NO: 13897 - DNA, 21 bp, Homo sapiens
tttggagtgarttccaaagga

SEQ ID NO: 13898 - DNA, 21 bp, Homo sapiens
agtattcttgrctccttttct

SEQ ID NO: 13899 - DNA, 21 bp, Homo sapiens
aggagaataargattgtgaga

SEQ ID NO: 13900 - DNA, 21 bp, Homo sapiens
tgtatgtgtgmaataaaaatc

SEQ ID NO: 13901 - DNA, 21 bp, Homo sapiens
ttatccaagarctaaataatt

SEQ ID NO: 13902 - DNA, 21 bp, Homo sapiens
tgtaccatcgyacctggtcct

SEQ ID NO: 13903 - DNA, 21 bp, Homo sapiens
attaaagcaartattattatt

SEQ ID NO: 13904 - DNA, 21 bp, Homo sapiens
ttcttgggggygataggacta

SEQ ID NO: 13905 - DNA, 21 bp, Homo sapiens
ataactccttraaacagttat

SEQ ID NO: 13906 - DNA, 21 bp, Homo sapiens
ttgtgatatcycttcccattc

SEQ ID NO: 13907 - DNA, 21 bp, Homo sapiens
acaaggaggakatgtatacct

SEQ ID NO: 13908 - DNA, 21 bp, Homo sapiens
ggtttttttakataaatggta

SEQ ID NO: 13909 - DNA, 21 bp, Homo sapiens
gaatatgtcartgtgtgcttt

SEQ ID NO: 13910 - DNA, 21 bp, Homo sapiens
ctccaatggtkcctcgatcct

SEQ ID NO: 13911 - DNA, 21 bp, Homo sapiens
caggttctcartagccacatg

SEQ ID NO: 13912 - DNA, 21 bp, Homo sapiens
tcttgactagyactccattat

SEQ ID NO: 13913 - DNA, 21 bp, Homo sapiens
aattcttatgrtactcttggc

SEQ ID NO: 13914 - DNA, 21 bp, Homo sapiens
atggaaaaagraacagcaccc

SEQ ID NO: 13915 - DNA, 21 bp, Homo sapiens
tgttgttataractacaactg

SEQ ID NO: 13916 - DNA, 21 bp, Homo sapiens
tatttagatcmatctgaaccc

SEQ ID NO: 13917 - DNA, 21 bp, Homo sapiens
cactgtatgtrtaaggcaatt

SEQ ID NO: 13918 - DNA, 21 bp, Homo sapiens
gtaccaaaaamagaaattttt

SEQ ID NO: 13919 - DNA, 21 bp, Homo sapiens
catgaaaccaktgctttccta

SEQ ID NO: 13920 - DNA, 21 bp, Homo sapiens
agtaaaaatcrttagagtgga

SEQ ID NO: 13921 - DNA, 21 bp, Homo sapiens
acttgagaacyttcccactga

SEQ ID NO: 13922 - DNA, 21 bp, Homo sapiens
gcaatcacaaktacgagtatg

SEQ ID NO: 13923 - DNA, 21 bp, Homo sapiens
gagccttaaargaggcaaaac

SEQ ID NO: 13924 - DNA, 21 bp, Homo sapiens
gaactgtacamaatgtcaaag

SEQ ID NO: 13925 - DNA, 21 bp, Homo sapiens
cacattgcctytgacccagca

SEQ ID NO: 13926 - DNA, 21 bp, Homo sapiens
gtacccctctyattaccatga

SEQ ID NO: 13927 - DNA, 21 bp, Homo sapiens
agttaataatytgacatttta

SEQ ID NO: 13928 - DNA, 21 bp, Homo sapiens
tctacataaamaatcaactca

SEQ ID NO: 13929 - DNA, 21 bp, Homo sapiens
gagtgttgcaraatgttaaat

SEQ ID NO: 13930 - DNA, 21 bp, Homo sapiens
tattttcttargagtggtcta

SEQ ID NO: 13931 - DNA, 21 bp, Homo sapiens
tctactacttkccagatgcta

SEQ ID NO: 13932 - DNA, 21 bp, Homo sapiens
gtcatagtagrgaaaatgcta

SEQ ID NO: 13933 - DNA, 21 bp, Homo sapiens
ctgttataatycaaccagttt

SEQ ID NO: 13934 - DNA, 21 bp, Homo sapiens
gggtagaaacygccttggact

SEQ ID NO: 13935 - DNA, 21 bp, Homo sapiens
tgaattttctytatttttttt

SEQ ID NO: 13936 - DNA, 21 bp, Homo sapiens
ttatctttacraatgaaatgg

SEQ ID NO: 13937 - DNA, 21 bp, Homo sapiens
ttgaatatccmtacctgccag

SEQ ID NO: 13938 - DNA, 21 bp, Homo sapiens
gcaattactcrtatttccttt

SEQ ID NO: 13939 - DNA, 21 bp, Homo sapiens
tctgtattttmactgcaagta

SEQ ID NO: 13940 - DNA, 21 bp, Homo sapiens
gccttcaccarcctaatgacc

SEQ ID NO: 13941 - DNA, 21 bp, Homo sapiens
agatgtaagckaagatctaag

SEQ ID NO: 13942 - DNA, 21 bp, Homo sapiens
agatatcttcrtaggaccatc

SEQ ID NO: 13943 - DNA, 21 bp, Homo sapiens
gtataaaacgracatctcttc

SEQ ID NO: 13944 - DNA, 21 bp, Homo sapiens
tgtagctcctrgggcagctgg

SEQ ID NO: 13945 - DNA, 21 bp, Homo sapiens
ggaatgtcagycgtgcacgtt

SEQ ID NO: 13946 - DNA, 21 bp, Homo sapiens
gaacttggagmtgtgtattag

SEQ ID NO: 13947 - DNA, 21 bp, Homo sapiens
tttttagcgamatgaatctgt

SEQ ID NO: 13948 - DNA, 21 bp, Homo sapiens
cgagactatgktagacccagg

SEQ ID NO: 13949 - DNA, 21 bp, Homo sapiens
atgtgtttatkgcacgtgaca

SEQ ID NO: 13950 - DNA, 21 bp, Homo sapiens
tcattttcccygagcgaattc

SEQ ID NO: 13951 - DNA, 21 bp, Homo sapiens
ttgttttcaayaccttcttgg

SEQ ID NO: 13952 - DNA, 21 bp, Homo sapiens
cagaaacaagkttgctgctct

SEQ ID NO: 13953 - DNA, 21 bp, Homo sapiens
caaaagtgttrctgacagata

SEQ ID NO: 13954 - DNA, 21 bp, Homo sapiens
taaatgagagkataaatagaa

SEQ ID NO: 13955 - DNA, 21 bp, Homo sapiens
gaggaattgcrgggaaagtgt

SEQ ID NO: 13956 - DNA, 21 bp, Homo sapiens
cccaccaaccrcttttcccct

SEQ ID NO: 13957 - DNA, 21 bp, Homo sapiens
atactgacttytgcttttata

SEQ ID NO: 13958 - DNA, 21 bp, Homo sapiens
cctcaggggtkgcatgggata

SEQ ID NO: 13959 - DNA, 21 bp, Homo sapiens
agagtaagcckgttatgtggc

SEQ ID NO: 13960 - DNA, 21 bp, Homo sapiens
gctagaaatakggcaaaattc

SEQ ID NO: 13961 - DNA, 21 bp, Homo sapiens
caaagcttcayctgcttggca

SEQ ID NO: 13962 - DNA, 21 bp, Homo sapiens
ctgtctcacayacactcacaa

SEQ ID NO: 13963 - DNA, 21 bp, Homo sapiens
gatataatgcyttgacgctta

SEQ ID NO: 13964 - DNA, 21 bp, Homo sapiens
agctgtgccaygtacaaatat

SEQ ID NO: 13965 - DNA, 21 bp, Homo sapiens
gtgtgtggtcytccccagttt

SEQ ID NO: 13966 - DNA, 21 bp, Homo sapiens
agtgtcagcamctcaactcaa

SEQ ID NO: 13967 - DNA, 21 bp, Homo sapiens
tcactataaakttgagaggca

SEQ ID NO: 13968 - DNA, 21 bp, Homo sapiens
acgccttgcaygcatctataa

SEQ ID NO: 13969 - DNA, 21 bp, Homo sapiens
ccttcctgatycgaccccctc

SEQ ID NO: 13970 - DNA, 21 bp, Homo sapiens
cttttgctacyttcttattag

SEQ ID NO: 13971 - DNA, 21 bp, Homo sapiens
tgactcacagraccaaaaaga

SEQ ID NO: 13972 - DNA, 21 bp, Homo sapiens
gctttcatgcrttatttaaca

SEQ ID NO: 13973 - DNA, 21 bp, Homo sapiens
cgagttttcarattccaattg

SEQ ID NO: 13974 - DNA, 21 bp, Homo sapiens
ctaatttataygccacttagt

SEQ ID NO: 13975 - DNA, 21 bp, Homo sapiens
cttctatcccrcaacctttaa

SEQ ID NO: 13976 - DNA, 21 bp, Homo sapiens
cctttgattarcttctttgtg

SEQ ID NO: 13977 - DNA, 21 bp, Homo sapiens
ttttcttcackttatatccct

SEQ ID NO: 13978 - DNA, 21 bp, Homo sapiens
atgtaaaaccrtccaaattgg

SEQ ID NO: 13979 - DNA, 21 bp, Homo sapiens
gacttacagarttttaaaata

SEQ ID NO: 13980 - DNA, 21 bp, Homo sapiens
caaagtaacaytctgcttgcg

SEQ ID NO: 13981 - DNA, 21 bp, Homo sapiens
cacagatgttyttaaactaat

SEQ ID NO: 13982 - DNA, 21 bp, Homo sapiens
ttcctctattycttatttagt

SEQ ID NO: 13983 - DNA, 21 bp, Homo sapiens
tccaaaggggraaaaaaaaag

SEQ ID NO: 13984 - DNA, 21 bp, Homo sapiens
tgttttggctygttcgatctt

SEQ ID NO: 13985 - DNA, 21 bp, Homo sapiens
gaagacaaatygggggccagg

SEQ ID NO: 13986 - DNA, 21 bp, Homo sapiens
tcaagttccayctgcaggcca

SEQ ID NO: 13987 - DNA, 21 bp, Homo sapiens
accatcacctraacctatttt

SEQ ID NO: 13988 - DNA, 21 bp, Homo sapiens
agaacttctamatccaagcgt

SEQ ID NO: 13989 - DNA, 21 bp, Homo sapiens
ttcattttttktttcagagaa

SEQ ID NO: 13990 - DNA, 21 bp, Homo sapiens
cttaccaacaytttcgatcag

SEQ ID NO: 13991 - DNA, 21 bp, Homo sapiens
ttgtgctgggktggttgaggt

SEQ ID NO: 13992 - DNA, 21 bp, Homo sapiens
tgtggagctamaggagcaaaa

SEQ ID NO: 13993 - DNA, 21 bp, Homo sapiens
cctagccctarttctggattt

SEQ ID NO: 13994 - DNA, 21 bp, Homo sapiens
tatatgtgatyattgggcata

SEQ ID NO: 13995 - DNA, 21 bp, Homo sapiens
tgtggttggtkaaggaagacc

SEQ ID NO: 13996 - DNA, 21 bp, Homo sapiens
gggaggcacarttgggatttc

SEQ ID NO: 13997 - DNA, 21 bp, Homo sapiens
gaaccaaatgrcatctagttt

SEQ ID NO: 13998 - DNA, 21 bp, Homo sapiens
tcacagtccaygtgggttggg

SEQ ID NO: 13999 - DNA, 21 bp, Homo sapiens
acattaaaccyttaatgcgtc

SEQ ID NO: 14000 - DNA, 21 bp, Homo sapiens
gctggaataarcaagagactt

SEQ ID NO: 14001 - DNA, 21 bp, Homo sapiens
tttgctgagayagtcgcggat

SEQ ID NO: 14002 - DNA, 21 bp, Homo sapiens
tcttcttcttygtcttttttt

SEQ ID NO: 14003 - DNA, 21 bp, Homo sapiens
ccgaaatacargaggtggcac

SEQ ID NO: 14004 - DNA, 21 bp, Homo sapiens
atctgcactgygttgaatact

SEQ ID NO: 14005 - DNA, 21 bp, Homo sapiens
acatgccgaakgagaagactc

SEQ ID NO: 14006 - DNA, 21 bp, Homo sapiens
tttactacacrtcccccaaac

SEQ ID NO: 14007 - DNA, 21 bp, Homo sapiens
gtgaaactggmggcgccctga

SEQ ID NO: 14008 - DNA, 21 bp, Homo sapiens
gactttgttaygtaacgggag

SEQ ID NO: 14009 - DNA, 21 bp, Homo sapiens
gctcctttgargtgagagatc

SEQ ID NO: 14010 - DNA, 21 bp, Homo sapiens
agtatagtatyacttgcttca

SEQ ID NO: 14011 - DNA, 21 bp, Homo sapiens
gagaggccccrgtaaggccag

SEQ ID NO: 14012 - DNA, 21 bp, Homo sapiens
ctctgttctgycttccccata

SEQ ID NO: 14013 - DNA, 21 bp, Homo sapiens
ccagctgtgargaacaacagg

SEQ ID NO: 14014 - DNA, 21 bp, Homo sapiens
ttggcagaagyggggagtcca

SEQ ID NO: 14015 - DNA, 21 bp, Homo sapiens
ttatgatttcrgtatataacc

SEQ ID NO: 14016 - DNA, 21 bp, Homo sapiens
agttcctcctrttaagtcttg

SEQ ID NO: 14017 - DNA, 21 bp, Homo sapiens
gtaagtatgcrgagatgctga

SEQ ID NO: 14018 - DNA, 21 bp, Homo sapiens
agtgaacctgyacttctcagg

SEQ ID NO: 14019 - DNA, 21 bp, Homo sapiens
aagccggcacyttcatgaact

SEQ ID NO: 14020 - DNA, 21 bp, Homo sapiens
aaggggtaagytgggacccac

SEQ ID NO: 14021 - DNA, 21 bp, Homo sapiens
agcttgaaatycagaggggca

SEQ ID NO: 14022 - DNA, 21 bp, Homo sapiens
cttggagtatytagggattat

SEQ ID NO: 14023 - DNA, 21 bp, Homo sapiens
ttctgtcatcmtcatgtctca

SEQ ID NO: 14024 - DNA, 21 bp, Homo sapiens
cttaccctcaygaaaagacaa

SEQ ID NO: 14025 - DNA, 21 bp, Homo sapiens
ccagtagtcayctttctgggc

SEQ ID NO: 14026 - DNA, 21 bp, Homo sapiens
agcaatcacaytcctgagcat

SEQ ID NO: 14027 - DNA, 21 bp, Homo sapiens
aaacctttatyaagcacctat

SEQ ID NO: 14028 - DNA, 21 bp, Homo sapiens
ctctcttgctyagattgggtg

SEQ ID NO: 14029 - DNA, 21 bp, Homo sapiens
aagatcgagtkcttccaaaga

SEQ ID NO: 14030 - DNA, 21 bp, Homo sapiens
tatgagtaccytcgtaattac

SEQ ID NO: 14031 - DNA, 21 bp, Homo sapiens
caggtaagaayaagaaaacca

SEQ ID NO: 14032 - DNA, 21 bp, Homo sapiens
ggctagtcacmcaccctgatc

SEQ ID NO: 14033 - DNA, 21 bp, Homo sapiens
aaaggcaatgyattagagaaa

SEQ ID NO: 14034 - DNA, 21 bp, Homo sapiens
tgctatgattyctgcatacaa

SEQ ID NO: 14035 - DNA, 21 bp, Homo sapiens
aatataaacaragagagtgta

SEQ ID NO: 14036 - DNA, 21 bp, Homo sapiens
atcctgtgtgytacttgctag

SEQ ID NO: 14037 - DNA, 21 bp, Homo sapiens
attaagttaaycctaactagg

SEQ ID NO: 14038 - DNA, 21 bp, Homo sapiens
gttctacactrtattattgtg

SEQ ID NO: 14039 - DNA, 21 bp, Homo sapiens
atgatgaaaayataaattcag

SEQ ID NO: 14040 - DNA, 21 bp, Homo sapiens
taactgcaacmtgaagctatg

SEQ ID NO: 14041 - DNA, 21 bp, Homo sapiens
acaaattccargacattattt

SEQ ID NO: 14042 - DNA, 21 bp, Homo sapiens
actaacacatrtatctggcac

SEQ ID NO: 14043 - DNA, 21 bp, Homo sapiens
tcatgtctgayttacatcttt

SEQ ID NO: 14044 - DNA, 21 bp, Homo sapiens
cagagggacaragaactgaca

SEQ ID NO: 14045 - DNA, 21 bp, Homo sapiens
agcctgattgytaactctttg

SEQ ID NO: 14046 - DNA, 21 bp, Homo sapiens
attggacagcrttcaaaaaat

SEQ ID NO: 14047 - DNA, 21 bp, Homo sapiens
gatgacaaackctgcttttgt

SEQ ID NO: 14048 - DNA, 21 bp, Homo sapiens
ttctgtgagtktggttactca

SEQ ID NO: 14049 - DNA, 21 bp, Homo sapiens
tcaatgagagrgagaaggggg

SEQ ID NO: 14050 - DNA, 21 bp, Homo sapiens
tcagagatacrtcttttagca

SEQ ID NO: 14051 - DNA, 21 bp, Homo sapiens
tttttggaaamaataacagga

SEQ ID NO: 14052 - DNA, 21 bp, Homo sapiens
tttactcttayccatccagct

SEQ ID NO: 14053 - DNA, 21 bp, Homo sapiens
gaaccattgcrtcaaagagca

SEQ ID NO: 14054 - DNA, 21 bp, Homo sapiens
tgtagaaaaakccctacactt

SEQ ID NO: 14055 - DNA, 21 bp, Homo sapiens
tagcattccamgattagctgg

SEQ ID NO: 14056 - DNA, 21 bp, Homo sapiens
tcatggcacaytttagaggac

SEQ ID NO: 14057 - DNA, 21 bp, Homo sapiens
tgcattttctktgaatatcct

SEQ ID NO: 14058 - DNA, 21 bp, Homo sapiens
tcttagtttcyatccattttt

SEQ ID NO: 14059 - DNA, 21 bp, Homo sapiens
caaggtccagrtgctctcttt

SEQ ID NO: 14060 - DNA, 21 bp, Homo sapiens
tcaagtctgayactagcaaat

SEQ ID NO: 14061 - DNA, 21 bp, Homo sapiens
attgtactacraagcaaagac

SEQ ID NO: 14062 - DNA, 21 bp, Homo sapiens
tgggcaccttrtttttacttt

SEQ ID NO: 14063 - DNA, 21 bp, Homo sapiens
atgaacaaggkacagaaggca

SEQ ID NO: 14064 - DNA, 21 bp, Homo sapiens
aatattcctcmaagttttact

SEQ ID NO: 14065 - DNA, 21 bp, Homo sapiens
gtattttcacrccagtgctag

SEQ ID NO: 14066 - DNA, 21 bp, Homo sapiens
tgttccaaacraagatgtttt

SEQ ID NO: 14067 - DNA, 21 bp, Homo sapiens
tccacatccaygatagtggga

SEQ ID NO: 14068 - DNA, 21 bp, Homo sapiens
ttggtcatatrtttgttacct

SEQ ID NO: 14069 - DNA, 21 bp, Homo sapiens
taaatatatayattgtggtag

SEQ ID NO: 14070 - DNA, 21 bp, Homo sapiens
gaaagaagtarattatctgaa

SEQ ID NO: 14071 - DNA, 21 bp, Homo sapiens
gtttgtttggrcagccaaatg

SEQ ID NO: 14072 - DNA, 21 bp, Homo sapiens
tctgtctaggrtcaggatgta

SEQ ID NO: 14073 - DNA, 21 bp, Homo sapiens
ctatctttgcytaaatggtgg

SEQ ID NO: 14074 - DNA, 21 bp, Homo sapiens
agacatcaaartgagtataca

SEQ ID NO: 14075 - DNA, 21 bp, Homo sapiens
aacttttccartgtggctaca

SEQ ID NO: 14076 - DNA, 21 bp, Homo sapiens
tcttcatttgmgatcttacca

SEQ ID NO: 14077 - DNA, 21 bp, Homo sapiens
gttttctaackctgtggctgc

SEQ ID NO: 14078 - DNA, 21 bp, Homo sapiens
tcaatcattcrgccagatgaa

SEQ ID NO: 14079 - DNA, 21 bp, Homo sapiens
tttacatacarttgtatcagc

SEQ ID NO: 14080 - DNA, 21 bp, Homo sapiens
cctaaatcaargaagccaaat

SEQ ID NO: 14081 - DNA, 21 bp, Homo sapiens
ctgttctattractggctgtt

SEQ ID NO: 14082 - DNA, 21 bp, Homo sapiens
ttttcaagggrtcgttccgag

SEQ ID NO: 14083 - DNA, 21 bp, Homo sapiens
ttgactatttyttggggaaga

SEQ ID NO: 14084 - DNA, 21 bp, Homo sapiens
cattaagaaayagtgatatat

SEQ ID NO: 14085 - DNA, 21 bp, Homo sapiens
tgaggagagaraggcagtgcc

SEQ ID NO: 14086 - DNA, 21 bp, Homo sapiens
gaaaacttccrtcactgcaat

SEQ ID NO: 14087 - DNA, 21 bp, Homo sapiens
tcctcctaggrgtcaagacaa

SEQ ID NO: 14088 - DNA, 21 bp, Homo sapiens
tttatagctgyagaatcggaa

SEQ ID NO: 14089 - DNA, 21 bp, Homo sapiens
gtttcaatatyttttattttt

SEQ ID NO: 14090 - DNA, 21 bp, Homo sapiens
caaagactgaygccatgatag

SEQ ID NO: 14091 - DNA, 21 bp, Homo sapiens
ggagaattgartacttttagg

SEQ ID NO: 14092 - DNA, 21 bp, Homo sapiens
gggccatgatrgcctgaatca

SEQ ID NO: 14093 - DNA, 21 bp, Homo sapiens
aacttgtggcrtcccaaatgc

SEQ ID NO: 14094 - DNA, 21 bp, Homo sapiens
gagagtttcayagtgtaacaa

SEQ ID NO: 14095 - DNA, 21 bp, Homo sapiens
ttaaagttcartgccaaagct

SEQ ID NO: 14096 - DNA, 21 bp, Homo sapiens
tatatctcagmatccaagtac

SEQ ID NO: 14097 - DNA, 21 bp, Homo sapiens
gtagaatatgrtggtttgata

SEQ ID NO: 14098 - DNA, 21 bp, Homo sapiens
ggccccctccrtgttaactga

SEQ ID NO: 14099 - DNA, 21 bp, Homo sapiens
ggaagctatarcaaaatacca

SEQ ID NO: 14100 - DNA, 21 bp, Homo sapiens
gcagtaatttyttatcctcct

SEQ ID NO: 14101 - DNA, 21 bp, Homo sapiens
cttctattctrttgctcatgg

SEQ ID NO: 14102 - DNA, 21 bp, Homo sapiens
ggaagtatacygcaggtcata

SEQ ID NO: 14103 - DNA, 21 bp, Homo sapiens
gtagaacttcrggtgtatttg

SEQ ID NO: 14104 - DNA, 21 bp, Homo sapiens
aatatagagaragtcattaag

SEQ ID NO: 14105 - DNA, 21 bp, Homo sapiens
ataatcatcaratgcccccag

SEQ ID NO: 14106 - DNA, 21 bp, Homo sapiens
cgttttgttcrtcatgaatgc

SEQ ID NO: 14107 - DNA, 21 bp, Homo sapiens
cgaccattttmatgatattga

SEQ ID NO: 14108 - DNA, 21 bp, Homo sapiens
ttcttcagccyctgcacccta

SEQ ID NO: 14109 - DNA, 21 bp, Homo sapiens
acaaacccagytatttctacc

SEQ ID NO: 14110 - DNA, 21 bp, Homo sapiens
gtcaaagaagraaattttcag

SEQ ID NO: 14111 - DNA, 21 bp, Homo sapiens
aattttaaaayatacagggtt

SEQ ID NO: 14112 - DNA, 21 bp, Homo sapiens
tccagaatttrattcaccatt

SEQ ID NO: 14113 - DNA, 21 bp, Homo sapiens
ttttccttgayaatagtatcc

SEQ ID NO: 14114 - DNA, 21 bp, Homo sapiens
tacaaactgargcaattggat

SEQ ID NO: 14115 - DNA, 21 bp, Homo sapiens
aatgaaaacaygcatctatat

SEQ ID NO: 14116 - DNA, 21 bp, Homo sapiens
ttttaatttcrtaggacaatt

SEQ ID NO: 14117 - DNA, 21 bp, Homo sapiens
ggactcagctrtagctctcac

SEQ ID NO: 14118 - DNA, 21 bp, Homo sapiens
tatcactgttygcttgatgaa

SEQ ID NO: 14119 - DNA, 21 bp, Homo sapiens
tggctaactaygtaaatcatt

SEQ ID NO: 14120 - DNA, 21 bp, Homo sapiens
caatttgagcrgctagtctcc

SEQ ID NO: 14121 - DNA, 21 bp, Homo sapiens
ctttgaacccrtttaaaaata

SEQ ID NO: 14122 - DNA, 21 bp, Homo sapiens
atatttaagayggagaaagca

SEQ ID NO: 14123 - DNA, 21 bp, Homo sapiens
tctttgcatcygtagaaactt

SEQ ID NO: 14124 - DNA, 21 bp, Homo sapiens
agagcaaggcrtggctaaaat

SEQ ID NO: 14125 - DNA, 21 bp, Homo sapiens
tctaattaaaractgaataca

SEQ ID NO: 14126 - DNA, 21 bp, Homo sapiens
caactttcgayttagtcacta

SEQ ID NO: 14127 - DNA, 21 bp, Homo sapiens
ggcaatgttcycggagcaaaa

SEQ ID NO: 14128 - DNA, 21 bp, Homo sapiens
agaatttttaygacgtataac

SEQ ID NO: 14129 - DNA, 21 bp, Homo sapiens
tctgctgttcracaaagctgg

SEQ ID NO: 14130 - DNA, 21 bp, Homo sapiens
aattgttatgyagatttcact

SEQ ID NO: 14131 - DNA, 21 bp, Homo sapiens
agataggtgayagacagatag

SEQ ID NO: 14132 - DNA, 21 bp, Homo sapiens
tttactactayaagcttaaat

SEQ ID NO: 14133 - DNA, 21 bp, Homo sapiens
acctgacttcyttcatgttat

SEQ ID NO: 14134 - DNA, 21 bp, Homo sapiens
agcaaaaatgrgctaaagact

SEQ ID NO: 14135 - DNA, 21 bp, Homo sapiens
cttattaaacrgaaagacaag

SEQ ID NO: 14136 - DNA, 21 bp, Homo sapiens
tcaacagagayggtaagctag

SEQ ID NO: 14137 - DNA, 21 bp, Homo sapiens
acaaactccgycctcattcag

SEQ ID NO: 14138 - DNA, 21 bp, Homo sapiens
aggacctcttmaagtcccagg

SEQ ID NO: 14139 - DNA, 21 bp, Homo sapiens
taagctcagtmagaatttcta

SEQ ID NO: 14140 - DNA, 21 bp, Homo sapiens
gccaaataaamgacagagatt

SEQ ID NO: 14141 - DNA, 21 bp, Homo sapiens
caactaactgytatttttgtt

SEQ ID NO: 14142 - DNA, 21 bp, Homo sapiens
tgccatctacragctacaaca

SEQ ID NO: 14143 - DNA, 21 bp, Homo sapiens
gaaaaggataygaaactgaag

SEQ ID NO: 14144 - DNA, 21 bp, Homo sapiens
ctacatactaygaaattctat

SEQ ID NO: 14145 - DNA, 21 bp, Homo sapiens
catagttctgmtttacagatg

SEQ ID NO: 14146 - DNA, 21 bp, Homo sapiens
gctatatttcracgggaggat

SEQ ID NO: 14147 - DNA, 21 bp, Homo sapiens
cagcaagatgrccgatagaga

SEQ ID NO: 14148 - DNA, 21 bp, Homo sapiens
ttgaggcccayccacacctcc

SEQ ID NO: 14149 - DNA, 21 bp, Homo sapiens
aaaggtaaaamggtgtgctga

SEQ ID NO: 14150 - DNA, 21 bp, Homo sapiens
agcaccattcrattgaatcgt

SEQ ID NO: 14151 - DNA, 21 bp, Homo sapiens
gaaatcaccartgaagaagct

SEQ ID NO: 14152 - DNA, 21 bp, Homo sapiens
tagctcttccyctcaccttac

SEQ ID NO: 14153 - DNA, 21 bp, Homo sapiens
tgcttaaaacycttttgatag

SEQ ID NO: 14154 - DNA, 21 bp, Homo sapiens
atatatcgaargcatttttta

SEQ ID NO: 14155 - DNA, 21 bp, Homo sapiens
cttcctgtctmttcttcaaaa

SEQ ID NO: 14156 - DNA, 21 bp, Homo sapiens
tgggaatatgkatggtactga

SEQ ID NO: 14157 - DNA, 21 bp, Homo sapiens
tttaaggaaakaagtagcaag

SEQ ID NO: 14158 - DNA, 21 bp, Homo sapiens
attaagagacrtgcagaaaaa

SEQ ID NO: 14159 - DNA, 21 bp, Homo sapiens
gatgagaaaayggtcaaacgc

SEQ ID NO: 14160 - DNA, 21 bp, Homo sapiens
ttaattatttygttttttatg

SEQ ID NO: 14161 - DNA, 21 bp, Homo sapiens
agaccttggartgctgtttgt

SEQ ID NO: 14162 - DNA, 21 bp, Homo sapiens
tggtttgcccrgatctcagaa

SEQ ID NO: 14163 - DNA, 21 bp, Homo sapiens
cctgtttgggyttctgatttg

SEQ ID NO: 14164 - DNA, 21 bp, Homo sapiens
tatattacacrcagtcaaaca

SEQ ID NO: 14165 - DNA, 21 bp, Homo sapiens
cttaatttctrcacttgaatg

SEQ ID NO: 14166 - DNA, 21 bp, Homo sapiens
tcttaaaaatktacacaaaac

SEQ ID NO: 14167 - DNA, 21 bp, Homo sapiens
gataaagtttytgactgctat

SEQ ID NO: 14168 - DNA, 21 bp, Homo sapiens
tataaagcctrgaagggtgga

SEQ ID NO: 14169 - DNA, 21 bp, Homo sapiens
ttttgcagtgytttgttttct

SEQ ID NO: 14170 - DNA, 21 bp, Homo sapiens
aactgtctcaygttcgataac

SEQ ID NO: 14171 - DNA, 21 bp, Homo sapiens
accattgatcrctgatgggaa

SEQ ID NO: 14172 - DNA, 21 bp, Homo sapiens
tatcttgatcycctgaaaaaa

SEQ ID NO: 14173 - DNA, 21 bp, Homo sapiens
aataatgatgyccacatcaca

SEQ ID NO: 14174 - DNA, 21 bp, Homo sapiens
acaaccatcartttaattttg

SEQ ID NO: 14175 - DNA, 21 bp, Homo sapiens
tcacaatgtcrtagaatgcta

SEQ ID NO: 14176 - DNA, 21 bp, Homo sapiens
acaataactcygtttaaacaa

SEQ ID NO: 14177 - DNA, 21 bp, Homo sapiens
acacaggagaytctccaccag

SEQ ID NO: 14178 - DNA, 21 bp, Homo sapiens
tcttctttgcrctgaagttag

SEQ ID NO: 14179 - DNA, 21 bp, Homo sapiens
gttgttgttgyttttggtaaa

SEQ ID NO: 14180 - DNA, 21 bp, Homo sapiens
ccaggaatggytggtcattgg

SEQ ID NO: 14181 - DNA, 21 bp, Homo sapiens
caaccttaagygaatctcctg

SEQ ID NO: 14182 - DNA, 21 bp, Homo sapiens
agagtaacatyttagtatcct

SEQ ID NO: 14183 - DNA, 21 bp, Homo sapiens
caggcattgaytgtaattaca

SEQ ID NO: 14184 - DNA, 21 bp, Homo sapiens
gccaagtttaytgaagaatgt

SEQ ID NO: 14185 - DNA, 21 bp, Homo sapiens
ctctgcatgaraggagaactt

SEQ ID NO: 14186 - DNA, 21 bp, Homo sapiens
aacatgtaccratctaaaaac

SEQ ID NO: 14187 - DNA, 21 bp, Homo sapiens
tgagttttcayatattcagag

SEQ ID NO: 14188 - DNA, 21 bp, Homo sapiens
tgtgatttcartgagtaccct

SEQ ID NO: 14189 - DNA, 21 bp, Homo sapiens
taaagggcaayctaattactt

SEQ ID NO: 14190 - DNA, 21 bp, Homo sapiens
ccctggtttcyagcattgcct

SEQ ID NO: 14191 - DNA, 21 bp, Homo sapiens
ctcacaagctrtttcatctac

SEQ ID NO: 14192 - DNA, 21 bp, Homo sapiens
gcacaaaaaaytgatttcaaa

SEQ ID NO: 14193 - DNA, 21 bp, Homo sapiens
aaaatggaaaragaataacaa

SEQ ID NO: 14194 - DNA, 21 bp, Homo sapiens
agaagttaccrtttaacatta

SEQ ID NO: 14195 - DNA, 21 bp, Homo sapiens
tatatttctcmttttttagct

SEQ ID NO: 14196 - DNA, 21 bp, Homo sapiens
tcttttagaargaatctcttt

SEQ ID NO: 14197 - DNA, 21 bp, Homo sapiens
cagatgaattmacactgctgg

SEQ ID NO: 14198 - DNA, 21 bp, Homo sapiens
tttgcaattcrgaaacaagta

SEQ ID NO: 14199 - DNA, 21 bp, Homo sapiens
accagcaaggrgagggaacct

SEQ ID NO: 14200 - DNA, 21 bp, Homo sapiens
ctcagtgcaaygtagtattta

SEQ ID NO: 14201 - DNA, 21 bp, Homo sapiens
atgtatagtargtggtgtgaa

SEQ ID NO: 14202 - DNA, 21 bp, Homo sapiens
catttcaaagyacaccaacac

SEQ ID NO: 14203 - DNA, 21 bp, Homo sapiens
gtcagtaaccrctttaagaac

SEQ ID NO: 14204 - DNA, 21 bp, Homo sapiens
ccacagaagamtgaacctaga

SEQ ID NO: 14205 - DNA, 21 bp, Homo sapiens
cacttccaacrttcactggga

SEQ ID NO: 14206 - DNA, 21 bp, Homo sapiens
cttaaatcctyaggttattaa

SEQ ID NO: 14207 - DNA, 21 bp, Homo sapiens
gcagtgtctakctcctggaag

SEQ ID NO: 14208 - DNA, 21 bp, Homo sapiens
taagaaaaaartagacttttc

SEQ ID NO: 14209 - DNA, 21 bp, Homo sapiens
tgatgggacayggagaacaat

SEQ ID NO: 14210 - DNA, 21 bp, Homo sapiens
tctactatatractactacaa

SEQ ID NO: 14211 - DNA, 21 bp, Homo sapiens
acacaagtagycaaaaaattg

SEQ ID NO: 14212 - DNA, 21 bp, Homo sapiens
acatagtgaartaaaaacacg

SEQ ID NO: 14213 - DNA, 21 bp, Homo sapiens
ctggagtattmgtatagctta

SEQ ID NO: 14214 - DNA, 21 bp, Homo sapiens
ggcacttgacrtaagtatttt

SEQ ID NO: 14215 - DNA, 21 bp, Homo sapiens
tctaaacccarcggcaagcat

SEQ ID NO: 14216 - DNA, 21 bp, Homo sapiens
tttttgttttkgttttggttt

SEQ ID NO: 14217 - DNA, 21 bp, Homo sapiens
cctaagggacmatctggggga

SEQ ID NO: 14218 - DNA, 21 bp, Homo sapiens
tcgtaatttaygaaggaacga

SEQ ID NO: 14219 - DNA, 21 bp, Homo sapiens
aaaagcatgaytacaattgca

SEQ ID NO: 14220 - DNA, 21 bp, Homo sapiens
aataggaaacrtggatttcag

SEQ ID NO: 14221 - DNA, 21 bp, Homo sapiens
tgataagtagygtaacatgta

SEQ ID NO: 14222 - DNA, 21 bp, Homo sapiens
tagtcacatgrtgatagaagc

SEQ ID NO: 14223 - DNA, 21 bp, Homo sapiens
aagaaggaatkgggagagaca

SEQ ID NO: 14224 - DNA, 21 bp, Homo sapiens
cctagccacaygtttgtttta

SEQ ID NO: 14225 - DNA, 21 bp, Homo sapiens
gaagtgtcagraaaattgaga

SEQ ID NO: 14226 - DNA, 21 bp, Homo sapiens
attgaatgagrtagtccatat

SEQ ID NO: 14227 - DNA, 21 bp, Homo sapiens
tcagtcagctyctgaaggaga

SEQ ID NO: 14228 - DNA, 21 bp, Homo sapiens
gactgttataygcctttaatc

SEQ ID NO: 14229 - DNA, 21 bp, Homo sapiens
atgtgggcagytcatcaaatg

SEQ ID NO: 14230 - DNA, 21 bp, Homo sapiens
taaatgtactmcaagagttca

SEQ ID NO: 14231 - DNA, 21 bp, Homo sapiens
gtggccatgcmtgaggttgag

SEQ ID NO: 14232 - DNA, 21 bp, Homo sapiens
tctcaccaacrtggaagtcac

SEQ ID NO: 14233 - DNA, 21 bp, Homo sapiens
cagagtttaamtttgtctgag

SEQ ID NO: 14234 - DNA, 21 bp, Homo sapiens
aattggaatcrctgagcaata

SEQ ID NO: 14235 - DNA, 21 bp, Homo sapiens
atttttaattytcaagttctg

SEQ ID NO: 14236 - DNA, 21 bp, Homo sapiens
ctttttcccgkggggaagaga

SEQ ID NO: 14237 - DNA, 21 bp, Homo sapiens
aataacttcartaatatatat

SEQ ID NO: 14238 - DNA, 21 bp, Homo sapiens
tacatcactgkgggacttctt

SEQ ID NO: 14239 - DNA, 21 bp, Homo sapiens
gattccatagrgcagcggtct

SEQ ID NO: 14240 - DNA, 21 bp, Homo sapiens
tgggagtacayggaaaaggtc

SEQ ID NO: 14241 - DNA, 21 bp, Homo sapiens
ctataagctgyttttttcacc

SEQ ID NO: 14242 - DNA, 21 bp, Homo sapiens
taatacacttraaagttttca

SEQ ID NO: 14243 - DNA, 21 bp, Homo sapiens
ctgagaagccycattctagat

SEQ ID NO: 14244 - DNA, 21 bp, Homo sapiens
cattatttgtrtgagcacatt

SEQ ID NO: 14245 - DNA, 21 bp, Homo sapiens
cccaacccatyctgagtgttt

SEQ ID NO: 14246 - DNA, 21 bp, Homo sapiens
ttcattcataktaatttaaga

SEQ ID NO: 14247 - DNA, 21 bp, Homo sapiens
gggagacacartccaatccat

SEQ ID NO: 14248 - DNA, 21 bp, Homo sapiens
tctttgcaatyggacaacttg

SEQ ID NO: 14249 - DNA, 21 bp, Homo sapiens
tccaagagttytgtaggggag

SEQ ID NO: 14250 - DNA, 21 bp, Homo sapiens
tcatatgcttrttgtgacttg

SEQ ID NO: 14251 - DNA, 21 bp, Homo sapiens
atgcagaggamgtgggttttg

SEQ ID NO: 14252 - DNA, 21 bp, Homo sapiens
gtttaacatgratactgatgg

SEQ ID NO: 14253 - DNA, 21 bp, Homo sapiens
aactctaggartcttgcaaag

SEQ ID NO: 14254 - DNA, 21 bp, Homo sapiens
acaggcgaagmtcccttctgc

SEQ ID NO: 14255 - DNA, 21 bp, Homo sapiens
atatggcaackgcttcatttt

SEQ ID NO: 14256 - DNA, 21 bp, Homo sapiens
aaaagggttcygctctatcac

SEQ ID NO: 14257 - DNA, 21 bp, Homo sapiens
gtaatccttcyctataacaca

SEQ ID NO: 14258 - DNA, 21 bp, Homo sapiens
actctaacaaygtgagaactt

SEQ ID NO: 14259 - DNA, 21 bp, Homo sapiens
tctcctgaacyttcaatacat

SEQ ID NO: 14260 - DNA, 21 bp, Homo sapiens
caaaataaatrgtgataataa

SEQ ID NO: 14261 - DNA, 21 bp, Homo sapiens
ctagcacagarcaatgttaat

SEQ ID NO: 14262 - DNA, 21 bp, Homo sapiens
tattattataraagggaagat

SEQ ID NO: 14263 - DNA, 21 bp, Homo sapiens
gactacaataygccatggcta

SEQ ID NO: 14264 - DNA, 21 bp, Homo sapiens
acttgtttttrtagttatgaa

SEQ ID NO: 14265 - DNA, 21 bp, Homo sapiens
atgctcatatktggtccaaga

SEQ ID NO: 14266 - DNA, 21 bp, Homo sapiens
agtatagactmtatgaaccac

SEQ ID NO: 14267 - DNA, 21 bp, Homo sapiens
aaattctgagkgcttgagcct

SEQ ID NO: 14268 - DNA, 21 bp, Homo sapiens
tacaagtgatrtatgaggtct

SEQ ID NO: 14269 - DNA, 21 bp, Homo sapiens
agcctccttaygacattttat

SEQ ID NO: 14270 - DNA, 21 bp, Homo sapiens
acgcctcttgyttcaaagtta

SEQ ID NO: 14271 - DNA, 21 bp, Homo sapiens
tacaagaaggyttttctaatc

SEQ ID NO: 14272 - DNA, 21 bp, Homo sapiens
cacaattttgrtttcaagtct

SEQ ID NO: 14273 - DNA, 21 bp, Homo sapiens
tttagagtaayggtaaaaact

SEQ ID NO: 14274 - DNA, 21 bp, Homo sapiens
ggttaataaaytgataagtgc

SEQ ID NO: 14275 - DNA, 21 bp, Homo sapiens
atgtgcctggygtctggattt

SEQ ID NO: 14276 - DNA, 21 bp, Homo sapiens
cagaaggtctkcaactttcac

SEQ ID NO: 14277 - DNA, 21 bp, Homo sapiens
aaagggccackttttgaagga

SEQ ID NO: 14278 - DNA, 21 bp, Homo sapiens
ttttttgaccrtggattgccc

SEQ ID NO: 14279 - DNA, 21 bp, Homo sapiens
cataatgtaayaaaacttatt

SEQ ID NO: 14280 - DNA, 21 bp, Homo sapiens
tcattcaacaygcaattggta

SEQ ID NO: 14281 - DNA, 21 bp, Homo sapiens
ctctgtccccyttcttgctct

SEQ ID NO: 14282 - DNA, 21 bp, Homo sapiens
gaaatgccacrggctgaatat

SEQ ID NO: 14283 - DNA, 21 bp, Homo sapiens
tcaaattaccrcgttctttca

SEQ ID NO: 14284 - DNA, 21 bp, Homo sapiens
aatacctatamgaatagtggt

SEQ ID NO: 14285 - DNA, 21 bp, Homo sapiens
tattcactaaracttttattt

SEQ ID NO: 14286 - DNA, 21 bp, Homo sapiens
gtctgcaaagrtgttgccaaa

SEQ ID NO: 14287 - DNA, 21 bp, Homo sapiens
atcttttacartaggcaacac

SEQ ID NO: 14288 - DNA, 21 bp, Homo sapiens
catgaggctaygcacatacac

SEQ ID NO: 14289 - DNA, 21 bp, Homo sapiens
gagctcaccgygttttactta

SEQ ID NO: 14290 - DNA, 21 bp, Homo sapiens
gtatataatgytgttaggcta

SEQ ID NO: 14291 - DNA, 21 bp, Homo sapiens
aagaagtcacrgggactgaca

SEQ ID NO: 14292 - DNA, 21 bp, Homo sapiens
tttcttatagmcttttctcta

SEQ ID NO: 14293 - DNA, 21 bp, Homo sapiens
aatgtggctayaagaagctac

SEQ ID NO: 14294 - DNA, 21 bp, Homo sapiens
aatatttggcyaaggttttat

SEQ ID NO: 14295 - DNA, 21 bp, Homo sapiens
tgcaaatgcayccagtcgttt

SEQ ID NO: 14296 - DNA, 21 bp, Homo sapiens
aaaaaattatygaaggaaagt

SEQ ID NO: 14297 - DNA, 21 bp, Homo sapiens
tgcactagttyagagaaactg

SEQ ID NO: 14298 - DNA, 21 bp, Homo sapiens
ttaaaacaacracagcaaaag

SEQ ID NO: 14299 - DNA, 21 bp, Homo sapiens
cattttaaatmtttttcctaa

SEQ ID NO: 14300 - DNA, 21 bp, Homo sapiens
aagaaacccaygacacactca

SEQ ID NO: 14301 - DNA, 21 bp, Homo sapiens
taatcaaagaraaatagaaac

SEQ ID NO: 14302 - DNA, 21 bp, Homo sapiens
aatgatttccygttagagtat

SEQ ID NO: 14303 - DNA, 21 bp, Homo sapiens
aacacgattgygttataattg

SEQ ID NO: 14304 - DNA, 21 bp, Homo sapiens
ggaaatcgtgyttatgcagag

SEQ ID NO: 14305 - DNA, 21 bp, Homo sapiens
aaccactcgtrccattgaaac

SEQ ID NO: 14306 - DNA, 21 bp, Homo sapiens
tagttttatarcagagttagt

SEQ ID NO: 14307 - DNA, 21 bp, Homo sapiens
acttcggctcrttcagtctgc

SEQ ID NO: 14308 - DNA, 21 bp, Homo sapiens
tgagcattcartaaatctaag

SEQ ID NO: 14309 - DNA, 21 bp, Homo sapiens
atattaggaaycagcagaggt

SEQ ID NO: 14310 - DNA, 21 bp, Homo sapiens
ggtttattaamataaaatatc

SEQ ID NO: 14311 - DNA, 21 bp, Homo sapiens
gagccaatccyaaagactttt

SEQ ID NO: 14312 - DNA, 21 bp, Homo sapiens
attgaagattyagagataaca

SEQ ID NO: 14313 - DNA, 21 bp, Homo sapiens
ttcctttatcyattgctttgt

SEQ ID NO: 14314 - DNA, 21 bp, Homo sapiens
tcatctaattyggggaattta

SEQ ID NO: 14315 - DNA, 21 bp, Homo sapiens
tgcataagacrggcaaaattt

SEQ ID NO: 14316 - DNA, 21 bp, Homo sapiens
aatgatgccaytgaactctaa

SEQ ID NO: 14317 - DNA, 21 bp, Homo sapiens
taaaaacaaamcctaatactg

SEQ ID NO: 14318 - DNA, 21 bp, Homo sapiens
cattcttttakttctcttctt

SEQ ID NO: 14319 - DNA, 21 bp, Homo sapiens
ccagggacacygggctaccca

SEQ ID NO: 14320 - DNA, 21 bp, Homo sapiens
cctgctaaagragaagatata

SEQ ID NO: 14321 - DNA, 21 bp, Homo sapiens
tttaataggtkgggttttgcc

SEQ ID NO: 14322 - DNA, 21 bp, Homo sapiens
agttttggcaktcttaatggt

SEQ ID NO: 14323 - DNA, 21 bp, Homo sapiens
gtggaacaatyactttggaac

SEQ ID NO: 14324 - DNA, 21 bp, Homo sapiens
acatctccccrttgcttttgg

SEQ ID NO: 14325 - DNA, 21 bp, Homo sapiens
agtctattagyaaggagactt

SEQ ID NO: 14326 - DNA, 21 bp, Homo sapiens
agttaaaatargggacaagcc

SEQ ID NO: 14327 - DNA, 21 bp, Homo sapiens
acttagtcatrgttttagaag

SEQ ID NO: 14328 - DNA, 21 bp, Homo sapiens
actcgggtttrgtactcctta

SEQ ID NO: 14329 - DNA, 21 bp, Homo sapiens
cagctttggakcgtggctaga

SEQ ID NO: 14330 - DNA, 21 bp, Homo sapiens
tctgaaaagayacatagcaaa

SEQ ID NO: 14331 - DNA, 21 bp, Homo sapiens
agacttctctmtccacccaag

SEQ ID NO: 14332 - DNA, 21 bp, Homo sapiens
tctagagggtytatcctctag

SEQ ID NO: 14333 - DNA, 21 bp, Homo sapiens
cttaccaataycttgttgtcg

SEQ ID NO: 14334 - DNA, 21 bp, Homo sapiens
tcccatggggrgatgcaagag

SEQ ID NO: 14335 - DNA, 21 bp, Homo sapiens
cgctccccaaktcccactgct

SEQ ID NO: 14336 - DNA, 21 bp, Homo sapiens
taattttgtcrtctaattttt

SEQ ID NO: 14337 - DNA, 21 bp, Homo sapiens
ccccctggtcyttcaaatatt

SEQ ID NO: 14338 - DNA, 21 bp, Homo sapiens
ctggaagatgyagcaaaatac

SEQ ID NO: 14339 - DNA, 21 bp, Homo sapiens
tggtattttgyatagattatt

SEQ ID NO: 14340 - DNA, 21 bp, Homo sapiens
gttactcaggmaaggagacac

SEQ ID NO: 14341 - DNA, 21 bp, Homo sapiens
taaaatggatytctcaacatg

SEQ ID NO: 14342 - DNA, 21 bp, Homo sapiens
acacttcaaamtttacttaga

SEQ ID NO: 14343 - DNA, 21 bp, Homo sapiens
ggtgccactgkagtcagcaca

SEQ ID NO: 14344 - DNA, 21 bp, Homo sapiens
acaccctgaaytttgaagaca

SEQ ID NO: 14345 - DNA, 21 bp, Homo sapiens
taatcggactygaaagacatt

SEQ ID NO: 14346 - DNA, 21 bp, Homo sapiens
tcttggagacrccacacagct

SEQ ID NO: 14347 - DNA, 21 bp, Homo sapiens
agtcaactggktatctttatt

SEQ ID NO: 14348 - DNA, 21 bp, Homo sapiens
accacacagcygacctgtaga

SEQ ID NO: 14349 - DNA, 21 bp, Homo sapiens
tgcaatcttcyccatgttttt

SEQ ID NO: 14350 - DNA, 21 bp, Homo sapiens
tttgctctctyttgcctatac

SEQ ID NO: 14351 - DNA, 21 bp, Homo sapiens
caagaaatacrgatgttctca

SEQ ID NO: 14352 - DNA, 21 bp, Homo sapiens
gagaaaaatartaatcaatta

SEQ ID NO: 14353 - DNA, 21 bp, Homo sapiens
cacagtcttaytaattcaagc

SEQ ID NO: 14354 - DNA, 21 bp, Homo sapiens
aatcatttttyagtagctttc

SEQ ID NO: 14355 - DNA, 21 bp, Homo sapiens
tacaggatttkcatgattgca

SEQ ID NO: 14356 - DNA, 21 bp, Homo sapiens
ttcccaggacmaatgcatgtg

SEQ ID NO: 14357 - DNA, 21 bp, Homo sapiens
ttctagccccygcagtacttc

SEQ ID NO: 14358 - DNA, 21 bp, Homo sapiens
ctgccccctcrtgtgactttc

SEQ ID NO: 14359 - DNA, 21 bp, Homo sapiens
tgtctctgcaytacttcactc

SEQ ID NO: 14360 - DNA, 21 bp, Homo sapiens
cctgctatttrgcaaataagt

SEQ ID NO: 14361 - DNA, 21 bp, Homo sapiens
gagcaactggyggtgtcatgt

SEQ ID NO: 14362 - DNA, 21 bp, Homo sapiens
atgtctgaacrctcccatttg

SEQ ID NO: 14363 - DNA, 21 bp, Homo sapiens
ccaagacctcrccagcctggt

SEQ ID NO: 14364 - DNA, 21 bp, Homo sapiens
cagctctccaytctccctgct

SEQ ID NO: 14365 - DNA, 21 bp, Homo sapiens
ggctactgctrcctgcttatt

SEQ ID NO: 14366 - DNA, 21 bp, Homo sapiens
ggggctcgggrgtggggtatt

SEQ ID NO: 14367 - DNA, 21 bp, Homo sapiens
gtagtcgttamatttgtcatt

SEQ ID NO: 14368 - DNA, 21 bp, Homo sapiens
tgcaatcctcrtggcatttct

SEQ ID NO: 14369 - DNA, 21 bp, Homo sapiens
ttctcatccayatcaccggag

SEQ ID NO: 14370 - DNA, 21 bp, Homo sapiens
tgtgcgaattmctaagcatgt

SEQ ID NO: 14371 - DNA, 21 bp, Homo sapiens
ttagaagtatrctgcattttt

SEQ ID NO: 14372 - DNA, 21 bp, Homo sapiens
catacttaacrccgtcgacag

SEQ ID NO: 14373 - DNA, 21 bp, Homo sapiens
tcattatagcraatgtggaaa

SEQ ID NO: 14374 - DNA, 21 bp, Homo sapiens
gtgtgcctctyggagttactt

SEQ ID NO: 14375 - DNA, 21 bp, Homo sapiens
aggagagaggmtggagcacag

SEQ ID NO: 14376 - DNA, 21 bp, Homo sapiens
atgttaatacyacctccatga

SEQ ID NO: 14377 - DNA, 21 bp, Homo sapiens
ctcatccggtyattgaagaac

SEQ ID NO: 14378 - DNA, 21 bp, Homo sapiens
acatggaaatrctgtccacaa

SEQ ID NO: 14379 - DNA, 21 bp, Homo sapiens
aggattagagrtgctttttgg

SEQ ID NO: 14380 - DNA, 21 bp, Homo sapiens
ctgctggagcrgaggcaaggt

SEQ ID NO: 14381 - DNA, 21 bp, Homo sapiens
ttcaggtgtgyccagagtaag

SEQ ID NO: 14382 - DNA, 21 bp, Homo sapiens
tgactggccartcgagctcat

SEQ ID NO: 14383 - DNA, 21 bp, Homo sapiens
aaaagtgacamggtaacatac

SEQ ID NO: 14384 - DNA, 21 bp, Homo sapiens
aggatggaagragtgaggaaa

SEQ ID NO: 14385 - DNA, 21 bp, Homo sapiens
gagtctttcaraattgttgat

SEQ ID NO: 14386 - DNA, 21 bp, Homo sapiens
catctctgttytaaatgttgg

SEQ ID NO: 14387 - DNA, 21 bp, Homo sapiens
tgtaaccatgrtcctgaaatt

SEQ ID NO: 14388 - DNA, 21 bp, Homo sapiens
gacttgcttcrtagtataatt

SEQ ID NO: 14389 - DNA, 21 bp, Homo sapiens
tggcaaatagrttaggaggcc

SEQ ID NO: 14390 - DNA, 21 bp, Homo sapiens
tattgctttaygttacctatt

SEQ ID NO: 14391 - DNA, 21 bp, Homo sapiens
atgatgggttrttgtgatgaa

SEQ ID NO: 14392 - DNA, 21 bp, Homo sapiens
aggcttctcaygtttatacag

SEQ ID NO: 14393 - DNA, 21 bp, Homo sapiens
aaaaactttaygtcatcaggc

SEQ ID NO: 14394 - DNA, 21 bp, Homo sapiens
acactgtagcrctttttatat

SEQ ID NO: 14395 - DNA, 21 bp, Homo sapiens
gcttccctgtrtttgatgaat

SEQ ID NO: 14396 - DNA, 21 bp, Homo sapiens
atcaccccacygtgtcttcca

SEQ ID NO: 14397 - DNA, 21 bp, Homo sapiens
gaagtccaagrtcaaggcttc

SEQ ID NO: 14398 - DNA, 21 bp, Homo sapiens
aggaagaagcrtacatctttc

SEQ ID NO: 14399 - DNA, 21 bp, Homo sapiens
catttggtgartgaattaatg

SEQ ID NO: 14400 - DNA, 21 bp, Homo sapiens
gccacagcackcactgatttc

SEQ ID NO: 14401 - DNA, 21 bp, Homo sapiens
aagaagtactrtaggtaaaat

SEQ ID NO: 14402 - DNA, 21 bp, Homo sapiens
gaatgtaaaargtgaggaaga

SEQ ID NO: 14403 - DNA, 21 bp, Homo sapiens
aggttttcctytgaaatacca

SEQ ID NO: 14404 - DNA, 21 bp, Homo sapiens
gcaaagatttrtttttctctc

SEQ ID NO: 14405 - DNA, 21 bp, Homo sapiens
atggaattatrtgaagtaaaa

SEQ ID NO: 14406 - DNA, 21 bp, Homo sapiens
ccttttctttrcttggatgat

SEQ ID NO: 14407 - DNA, 21 bp, Homo sapiens
catgactgctrgagataggac

SEQ ID NO: 14408 - DNA, 21 bp, Homo sapiens
gcaggtatagrgtttttcttg

SEQ ID NO: 14409 - DNA, 21 bp, Homo sapiens
gaggtgacggraaagcaagtg

SEQ ID NO: 14410 - DNA, 21 bp, Homo sapiens
tttaagacatrgaaaatgccc

SEQ ID NO: 14411 - DNA, 21 bp, Homo sapiens
cagtgtctgartaatggaagc

SEQ ID NO: 14412 - DNA, 21 bp, Homo sapiens
aggctttgatytggtaagtcc

SEQ ID NO: 14413 - DNA, 21 bp, Homo sapiens
taaccaaagaytgaacacagt

SEQ ID NO: 14414 - DNA, 21 bp, Homo sapiens
ggagtggaggrcaaagaccct

SEQ ID NO: 14415 - DNA, 21 bp, Homo sapiens
aaagtaagagrtgtaggtaaa

SEQ ID NO: 14416 - DNA, 21 bp, Homo sapiens
aaatcgaagcrccaaatactc

SEQ ID NO: 14417 - DNA, 21 bp, Homo sapiens
tattctagttkgaaaaactca

SEQ ID NO: 14418 - DNA, 21 bp, Homo sapiens
taataaagtgkccactcagct

SEQ ID NO: 14419 - DNA, 21 bp, Homo sapiens
tgtactggttrttccatttag

SEQ ID NO: 14420 - DNA, 21 bp, Homo sapiens
tgaagtagcaytttgcatcag

SEQ ID NO: 14421 - DNA, 21 bp, Homo sapiens
ggtccactggytgtaagcaaa

SEQ ID NO: 14422 - DNA, 21 bp, Homo sapiens
aacaaaaagtraggaattaga

SEQ ID NO: 14423 - DNA, 21 bp, Homo sapiens
aggtgcatagrctttgatatt

SEQ ID NO: 14424 - DNA, 21 bp, Homo sapiens
gcctgtgtcayctccatctca

SEQ ID NO: 14425 - DNA, 21 bp, Homo sapiens
cctttatcacmagcagttatg

SEQ ID NO: 14426 - DNA, 21 bp, Homo sapiens
atcaacctacygatttagtta

SEQ ID NO: 14427 - DNA, 21 bp, Homo sapiens
ctgaaggtcartggctctgag

SEQ ID NO: 14428 - DNA, 21 bp, Homo sapiens
cagcacagctmgttggaaaac

SEQ ID NO: 14429 - DNA, 21 bp, Homo sapiens
acagggaaatmatcagcacat

SEQ ID NO: 14430 - DNA, 21 bp, Homo sapiens
gagccaatatyatgactttac

SEQ ID NO: 14431 - DNA, 21 bp, Homo sapiens
caagttcatgrttcactccag

SEQ ID NO: 14432 - DNA, 21 bp, Homo sapiens
ggacacatacrgcatatcata

SEQ ID NO: 14433 - DNA, 21 bp, Homo sapiens
cttatggaccrtttgtggact

SEQ ID NO: 14434 - DNA, 21 bp, Homo sapiens
tcatttcccakctctaacact

SEQ ID NO: 14435 - DNA, 21 bp, Homo sapiens
acatatttttrcattcgcttt

SEQ ID NO: 14436 - DNA, 21 bp, Homo sapiens
tcctacagatmctcgatggtt

SEQ ID NO: 14437 - DNA, 21 bp, Homo sapiens
gtttagactamtagctcttag

SEQ ID NO: 14438 - DNA, 21 bp, Homo sapiens
taaactcaggycaggagaaat

SEQ ID NO: 14439 - DNA, 21 bp, Homo sapiens
gctcaaactcygacaggaaag

SEQ ID NO: 14440 - DNA, 21 bp, Homo sapiens
tatgaaagggktgatatttga

SEQ ID NO: 14441 - DNA, 21 bp, Homo sapiens
ttttcgttcayagtagtgaga

SEQ ID NO: 14442 - DNA, 21 bp, Homo sapiens
tcagcttatgrgaagaaagtc

SEQ ID NO: 14443 - DNA, 21 bp, Homo sapiens
ttacctcctayttgcttagca

SEQ ID NO: 14444 - DNA, 21 bp, Homo sapiens
agaatcccccmcacacactaa

SEQ ID NO: 14445 - DNA, 21 bp, Homo sapiens
gggtcaggacrcctgagttca

SEQ ID NO: 14446 - DNA, 21 bp, Homo sapiens
tcatgctcacrtaaaatcctc

SEQ ID NO: 14447 - DNA, 21 bp, Homo sapiens
aggagatggcygccaatttcc

SEQ ID NO: 14448 - DNA, 21 bp, Homo sapiens
tgtaactgctrttggttggaa

SEQ ID NO: 14449 - DNA, 21 bp, Homo sapiens
tcttaccccakttcctgaagt

SEQ ID NO: 14450 - DNA, 21 bp, Homo sapiens
agatcttgtargtttggacat

SEQ ID NO: 14451 - DNA, 21 bp, Homo sapiens
agctgaaatcyctgctaataa

SEQ ID NO: 14452 - DNA, 21 bp, Homo sapiens
ttattaaattmctatgtatgc

SEQ ID NO: 14453 - DNA, 21 bp, Homo sapiens
cctcttgtaaygatggaaacc

SEQ ID NO: 14454 - DNA, 21 bp, Homo sapiens
tcagacttgayctcctgttgt

SEQ ID NO: 14455 - DNA, 21 bp, Homo sapiens
cagaagcagcygagcttgccc

SEQ ID NO: 14456 - DNA, 21 bp, Homo sapiens
ctttatgacaytgtaattgtt

SEQ ID NO: 14457 - DNA, 21 bp, Homo sapiens
ttatcctgaamgttgtggaag

SEQ ID NO: 14458 - DNA, 21 bp, Homo sapiens
tggagaaaggrtgatacaagc

SEQ ID NO: 14459 - DNA, 21 bp, Homo sapiens
ctgcatgtagyatgttgagca

SEQ ID NO: 14460 - DNA, 21 bp, Homo sapiens
tgaatctgggrgaaaacacta

SEQ ID NO: 14461 - DNA, 21 bp, Homo sapiens
agttacaccaratatgcttgt

SEQ ID NO: 14462 - DNA, 21 bp, Homo sapiens
ctggacgctaycacttacatt

SEQ ID NO: 14463 - DNA, 21 bp, Homo sapiens
atccctatcgyatttgcatgc

SEQ ID NO: 14464 - DNA, 21 bp, Homo sapiens
gcacctggctktatatatcca

SEQ ID NO: 14465 - DNA, 21 bp, Homo sapiens
tatttctacarggggtgactg

SEQ ID NO: 14466 - DNA, 21 bp, Homo sapiens
tggccttccayttatggacca

SEQ ID NO: 14467 - DNA, 21 bp, Homo sapiens
ggcatcccaaytgggggactg

SEQ ID NO: 14468 - DNA, 21 bp, Homo sapiens
ccagctgccgkttcagtttca

SEQ ID NO: 14469 - DNA, 21 bp, Homo sapiens
acctcatctgycttactactg

SEQ ID NO: 14470 - DNA, 21 bp, Homo sapiens
agtagattccmccacccgaat

SEQ ID NO: 14471 - DNA, 21 bp, Homo sapiens
cttgcaaaacrttagtggtag

SEQ ID NO: 14472 - DNA, 21 bp, Homo sapiens
tgacattaccrcttgcctgtg

SEQ ID NO: 14473 - DNA, 21 bp, Homo sapiens
caacagcgtgrgttcacttct

SEQ ID NO: 14474 - DNA, 21 bp, Homo sapiens
gcattaactartttttttttt

SEQ ID NO: 14475 - DNA, 21 bp, Homo sapiens
cttcaaatacmtgatgcttac

SEQ ID NO: 14476 - DNA, 21 bp, Homo sapiens
agtaaagtggrtgaataaaaa

SEQ ID NO: 14477 - DNA, 21 bp, Homo sapiens
cattgagatcmattgcatgag

SEQ ID NO: 14478 - DNA, 21 bp, Homo sapiens
gcttccttctmaaaaccatta

SEQ ID NO: 14479 - DNA, 21 bp, Homo sapiens
tacctagacaytgtggctcct

SEQ ID NO: 14480 - DNA, 21 bp, Homo sapiens
tgaaacagttyggagtatctg

SEQ ID NO: 14481 - DNA, 21 bp, Homo sapiens
aaaaacaaaayaggacaagtt

SEQ ID NO: 14482 - DNA, 21 bp, Homo sapiens
tcagggactarcataactgga

SEQ ID NO: 14483 - DNA, 21 bp, Homo sapiens
ctgcataataytgaaattcat

SEQ ID NO: 14484 - DNA, 21 bp, Homo sapiens
taaagacaaamagatgatgac

SEQ ID NO: 14485 - DNA, 21 bp, Homo sapiens
agcttttcackcagtctggtg

SEQ ID NO: 14486 - DNA, 21 bp, Homo sapiens
catatcaattyttatgtcttc

SEQ ID NO: 14487 - DNA, 21 bp, Homo sapiens
atctaaaactrtggttattgt

SEQ ID NO: 14488 - DNA, 21 bp, Homo sapiens
aaatctggagktataatatgt

SEQ ID NO: 14489 - DNA, 21 bp, Homo sapiens
tgagaccctgrgcagggaacc

SEQ ID NO: 14490 - DNA, 21 bp, Homo sapiens
gataactttaytgaaatggcc

SEQ ID NO: 14491 - DNA, 21 bp, Homo sapiens
tgaacaatttrcatagtgata

SEQ ID NO: 14492 - DNA, 21 bp, Homo sapiens
atgctttctcrtgactgactt

SEQ ID NO: 14493 - DNA, 21 bp, Homo sapiens
gccaccagaaygctgtctgga

SEQ ID NO: 14494 - DNA, 21 bp, Homo sapiens
attctggctarataaagcaaa

SEQ ID NO: 14495 - DNA, 21 bp, Homo sapiens
atgatagaatygttctctttg

SEQ ID NO: 14496 - DNA, 21 bp, Homo sapiens
tagaattaggraaaaggatct

SEQ ID NO: 14497 - DNA, 21 bp, Homo sapiens
ctcctggattygttgaatttt

SEQ ID NO: 14498 - DNA, 21 bp, Homo sapiens
aaaactgaggrgtgaaatatc

SEQ ID NO: 14499 - DNA, 21 bp, Homo sapiens
aaacaaggaaragtgggttct

SEQ ID NO: 14500 - DNA, 21 bp, Homo sapiens
atatcactttrtctttttctg

SEQ ID NO: 14501 - DNA, 21 bp, Homo sapiens
aggcataatcmtatggccacc

SEQ ID NO: 14502 - DNA, 21 bp, Homo sapiens
atgcctatcartggctaattg

SEQ ID NO: 14503 - DNA, 21 bp, Homo sapiens
tttccaattgrcacttgcatt

SEQ ID NO: 14504 - DNA, 21 bp, Homo sapiens
ataagaaggaraatattaaac

SEQ ID NO: 14505 - DNA, 21 bp, Homo sapiens
attagagatargctttaggaa

SEQ ID NO: 14506 - DNA, 21 bp, Homo sapiens
tcttgaaagayggggtggttg

SEQ ID NO: 14507 - DNA, 21 bp, Homo sapiens
aacaaacaaamacctttgcca

SEQ ID NO: 14508 - DNA, 21 bp, Homo sapiens
aagggtccttraaagtaaaag

SEQ ID NO: 14509 - DNA, 21 bp, Homo sapiens
aggctggattyttcagagatc

SEQ ID NO: 14510 - DNA, 21 bp, Homo sapiens
gcaaacagttyataaccctgg

SEQ ID NO: 14511 - DNA, 21 bp, Homo sapiens
cctctcagccygggaaggcag

SEQ ID NO: 14512 - DNA, 21 bp, Homo sapiens
ttctcagtaaytgatggaata

SEQ ID NO: 14513 - DNA, 21 bp, Homo sapiens
ctaacgtcacyccacaggtcc

SEQ ID NO: 14514 - DNA, 21 bp, Homo sapiens
ctcccttggaygtcagcttgt

SEQ ID NO: 14515 - DNA, 21 bp, Homo sapiens
atggccccacygccctgacca

SEQ ID NO: 14516 - DNA, 21 bp, Homo sapiens
ggacatacccyggttcagcat

SEQ ID NO: 14517 - DNA, 21 bp, Homo sapiens
ctcttaaggarttcagttatg

SEQ ID NO: 14518 - DNA, 21 bp, Homo sapiens
tttacgcgtgmtcagtgtgcc

SEQ ID NO: 14519 - DNA, 21 bp, Homo sapiens
tttaaaaatcrtatgcattat

SEQ ID NO: 14520 - DNA, 21 bp, Homo sapiens
cacatttggcrggcaagaggc

SEQ ID NO: 14521 - DNA, 21 bp, Homo sapiens
gatcatattamacctgctgaa

SEQ ID NO: 14522 - DNA, 21 bp, Homo sapiens
ccagacaccaygtgcagggga

SEQ ID NO: 14523 - DNA, 21 bp, Homo sapiens
ccctgggccaycatgtcagtc

SEQ ID NO: 14524 - DNA, 21 bp, Homo sapiens
gaatcccaagyttgccattta

SEQ ID NO: 14525 - DNA, 21 bp, Homo sapiens
ggtctctaaayctcaggaagt

SEQ ID NO: 14526 - DNA, 21 bp, Homo sapiens
aagagtagtgyaccccagtgt

SEQ ID NO: 14527 - DNA, 21 bp, Homo sapiens
ccctgcctgaygtctaagaag

SEQ ID NO: 14528 - DNA, 21 bp, Homo sapiens
gagtgggatcrttgctattag

SEQ ID NO: 14529 - DNA, 21 bp, Homo sapiens
atgagtgtgaygttattacat

SEQ ID NO: 14530 - DNA, 21 bp, Homo sapiens
gcagccccagytatccttccc

SEQ ID NO: 14531 - DNA, 21 bp, Homo sapiens
gtgttttgccktcaggaaggg

SEQ ID NO: 14532 - DNA, 21 bp, Homo sapiens
aataattcacytttacttcca

SEQ ID NO: 14533 - DNA, 21 bp, Homo sapiens
aacagcttgayaggtggattt

SEQ ID NO: 14534 - DNA, 21 bp, Homo sapiens
ctgctcaactycctcaggcct

SEQ ID NO: 14535 - DNA, 21 bp, Homo sapiens
taaaactgttraaaatacaca

SEQ ID NO: 14536 - DNA, 21 bp, Homo sapiens
cctgatcaccytggaaatgtt

SEQ ID NO: 14537 - DNA, 21 bp, Homo sapiens
taataaaagtyagaaagctta

SEQ ID NO: 14538 - DNA, 21 bp, Homo sapiens
atctgtggatrgacacaaaga

SEQ ID NO: 14539 - DNA, 21 bp, Homo sapiens
ctgtagttttytgagatcaaa

SEQ ID NO: 14540 - DNA, 21 bp, Homo sapiens
gcagacccacrcctgctccat

SEQ ID NO: 14541 - DNA, 21 bp, Homo sapiens
acttacgcctkggataccttt

SEQ ID NO: 14542 - DNA, 21 bp, Homo sapiens
aaaaaaaactrgactttgtgc

SEQ ID NO: 14543 - DNA, 21 bp, Homo sapiens
gaaattgatakggtttttgag

SEQ ID NO: 14544 - DNA, 21 bp, Homo sapiens
acttaatgaaygaacaaaaac

SEQ ID NO: 14545 - DNA, 21 bp, Homo sapiens
tctgagttaarccattatcat

SEQ ID NO: 14546 - DNA, 21 bp, Homo sapiens
ttttctcccargaatactggc

SEQ ID NO: 14547 - DNA, 21 bp, Homo sapiens
ggaaagaccaygtgaaggcat

SEQ ID NO: 14548 - DNA, 21 bp, Homo sapiens
aaaatgaaatraagtagactg

SEQ ID NO: 14549 - DNA, 21 bp, Homo sapiens
gagacaatagyagggcaacaa

SEQ ID NO: 14550 - DNA, 21 bp, Homo sapiens
gaggaaactargaatcatgca

SEQ ID NO: 14551 - DNA, 21 bp, Homo sapiens
gaccacacgcrcacacacaca

SEQ ID NO: 14552 - DNA, 21 bp, Homo sapiens
gggagatagcrttcatttttt

SEQ ID NO: 14553 - DNA, 21 bp, Homo sapiens
gaggcttctgytgcctttact

SEQ ID NO: 14554 - DNA, 21 bp, Homo sapiens
cagtactctcragggccgggc

SEQ ID NO: 14555 - DNA, 21 bp, Homo sapiens
tcctgggatgragaagacctg

SEQ ID NO: 14556 - DNA, 21 bp, Homo sapiens
gataatctcarcatcatctaa

SEQ ID NO: 14557 - DNA, 21 bp, Homo sapiens
atatccagagyggagactgga

SEQ ID NO: 14558 - DNA, 21 bp, Homo sapiens
ctcagcctttrcccagaccca

SEQ ID NO: 14559 - DNA, 21 bp, Homo sapiens
cctttatgacratcctggttt

SEQ ID NO: 14560 - DNA, 21 bp, Homo sapiens
aaattctatgyagcttttttt

SEQ ID NO: 14561 - DNA, 21 bp, Homo sapiens
agctttttttyctctgagaag

SEQ ID NO: 14562 - DNA, 21 bp, Homo sapiens
agataggacgrttcttgctag

SEQ ID NO: 14563 - DNA, 21 bp, Homo sapiens
gttgatgagcrtgaacaaagc

SEQ ID NO: 14564 - DNA, 21 bp, Homo sapiens
aacttgggttyttggtatatg

SEQ ID NO: 14565 - DNA, 21 bp, Homo sapiens
tccacaaaaakattgagcaag

SEQ ID NO: 14566 - DNA, 21 bp, Homo sapiens
tggaatatttmaaaatgtcca

SEQ ID NO: 14567 - DNA, 21 bp, Homo sapiens
tcaatcatgtygaagcacaca

SEQ ID NO: 14568 - DNA, 21 bp, Homo sapiens
ttggacaaagrcccctcaaag

SEQ ID NO: 14569 - DNA, 21 bp, Homo sapiens
aaacaattagygaagtgatga

SEQ ID NO: 14570 - DNA, 21 bp, Homo sapiens
tgaaaacctgkaagtataaac

SEQ ID NO: 14571 - DNA, 21 bp, Homo sapiens
ctccttcatcytcccttgcct

SEQ ID NO: 14572 - DNA, 21 bp, Homo sapiens
aacagtgaacragatcaacaa

SEQ ID NO: 14573 - DNA, 21 bp, Homo sapiens
aaacctttctytcatgttttc

SEQ ID NO: 14574 - DNA, 21 bp, Homo sapiens
tgctttgttgyattgtgcctt

SEQ ID NO: 14575 - DNA, 21 bp, Homo sapiens
gaagagttggytgctttcaaa

SEQ ID NO: 14576 - DNA, 21 bp, Homo sapiens
gtcagaccatrtaattcaata

SEQ ID NO: 14577 - DNA, 21 bp, Homo sapiens
ggacttaaaaygggaaagaca

SEQ ID NO: 14578 - DNA, 21 bp, Homo sapiens
atggtttctcyatattttggg

SEQ ID NO: 14579 - DNA, 21 bp, Homo sapiens
aaattggcagrtatcacattt

SEQ ID NO: 14580 - DNA, 21 bp, Homo sapiens
gtacctgtaarttccaatcag

SEQ ID NO: 14581 - DNA, 21 bp, Homo sapiens
agaaggagggyacagaaagca

SEQ ID NO: 14582 - DNA, 21 bp, Homo sapiens
tgcagtgggamcctcatttgt

SEQ ID NO: 14583 - DNA, 21 bp, Homo sapiens
aatcactctgmaactcacagt

SEQ ID NO: 14584 - DNA, 21 bp, Homo sapiens
cgcctttactmatctttggta

SEQ ID NO: 14585 - DNA, 21 bp, Homo sapiens
tgaaagctaartgctgagtaa

SEQ ID NO: 14586 - DNA, 21 bp, Homo sapiens
aagccactgaygtatcatacc

SEQ ID NO: 14587 - DNA, 21 bp, Homo sapiens
tcctcaccaayacttgttatt

SEQ ID NO: 14588 - DNA, 21 bp, Homo sapiens
aataaactccygggttttgat

SEQ ID NO: 14589 - DNA, 21 bp, Homo sapiens
ggaattatacrcaccaaactg

SEQ ID NO: 14590 - DNA, 21 bp, Homo sapiens
ggaaagaaagyctttcggggg

SEQ ID NO: 14591 - DNA, 21 bp, Homo sapiens
tctgtttcggrgttctatgtt

SEQ ID NO: 14592 - DNA, 21 bp, Homo sapiens
acggaaaggayattagatttt

SEQ ID NO: 14593 - DNA, 21 bp, Homo sapiens
tccatgttcaytacctctgct

SEQ ID NO: 14594 - DNA, 21 bp, Homo sapiens
aaaccatcacycttaggataa

SEQ ID NO: 14595 - DNA, 21 bp, Homo sapiens
atccattgatygtaagagaga

SEQ ID NO: 14596 - DNA, 21 bp, Homo sapiens
aaatggaattyactagcttga

SEQ ID NO: 14597 - DNA, 21 bp, Homo sapiens
taggcatgggmtatgagtcct

SEQ ID NO: 14598 - DNA, 21 bp, Homo sapiens
gggtccttatrtgtcatgcaa

SEQ ID NO: 14599 - DNA, 21 bp, Homo sapiens
cgatccatacrctgaaattac

SEQ ID NO: 14600 - DNA, 21 bp, Homo sapiens
tccttagattygtagagacaa

SEQ ID NO: 14601 - DNA, 21 bp, Homo sapiens
caaataacaayggttttaaga

SEQ ID NO: 14602 - DNA, 21 bp, Homo sapiens
tccatagctcygaatcacacc

SEQ ID NO: 14603 - DNA, 21 bp, Homo sapiens
tgtgcactacyatgcccagat

SEQ ID NO: 14604 - DNA, 21 bp, Homo sapiens
atgggtggcargagaaaaaaa

SEQ ID NO: 14605 - DNA, 21 bp, Homo sapiens
atctattcatkatggattctc

SEQ ID NO: 14606 - DNA, 21 bp, Homo sapiens
gggaaattctkcagtaaagca

SEQ ID NO: 14607 - DNA, 21 bp, Homo sapiens
atatttccaaytgtgtgggcc

SEQ ID NO: 14608 - DNA, 21 bp, Homo sapiens
aaagcagaaakgaagccccag

SEQ ID NO: 14609 - DNA, 21 bp, Homo sapiens
attacaggctrgaaggaatga

SEQ ID NO: 14610 - DNA, 21 bp, Homo sapiens
gagacccaaakaacttactac

SEQ ID NO: 14611 - DNA, 21 bp, Homo sapiens
acatcaaaaayacctttctta

SEQ ID NO: 14612 - DNA, 21 bp, Homo sapiens
tttacactttyttggtaagta

SEQ ID NO: 14613 - DNA, 21 bp, Homo sapiens
attctcttccyaaaagacaat

SEQ ID NO: 14614 - DNA, 21 bp, Homo sapiens
acacacagcaytggggaaagg

SEQ ID NO: 14615 - DNA, 21 bp, Homo sapiens
attggctcctyctctgcttct

SEQ ID NO: 14616 - DNA, 21 bp, Homo sapiens
gcacttccacrttgatagcct

SEQ ID NO: 14617 - DNA, 21 bp, Homo sapiens
cgggaacttayaagcaaggca

SEQ ID NO: 14618 - DNA, 21 bp, Homo sapiens
gtgtttcatcyttagctctca

SEQ ID NO: 14619 - DNA, 21 bp, Homo sapiens
aaattcctgcycttctcctgg

SEQ ID NO: 14620 - DNA, 21 bp, Homo sapiens
atattaaacakaacagggccc

SEQ ID NO: 14621 - DNA, 21 bp, Homo sapiens
ctgctgaacartctccatgca

SEQ ID NO: 14622 - DNA, 21 bp, Homo sapiens
ccctgagagargtgagctgga

SEQ ID NO: 14623 - DNA, 21 bp, Homo sapiens
atggtgaactratccttacat

SEQ ID NO: 14624 - DNA, 21 bp, Homo sapiens
aaaagacatgyttagacaaat

SEQ ID NO: 14625 - DNA, 21 bp, Homo sapiens
aactgtagtaytgcattgtgg

SEQ ID NO: 14626 - DNA, 21 bp, Homo sapiens
ttgcggaaaaygagcgggtca

SEQ ID NO: 14627 - DNA, 21 bp, Homo sapiens
agaaccacagyggaactgaac

SEQ ID NO: 14628 - DNA, 21 bp, Homo sapiens
cattttgccartctggttttg

SEQ ID NO: 14629 - DNA, 21 bp, Homo sapiens
taaccccaccrtaggttttgc

SEQ ID NO: 14630 - DNA, 21 bp, Homo sapiens
acctgagcctygctagtccac

SEQ ID NO: 14631 - DNA, 21 bp, Homo sapiens
catcattaagkattgcattgc

SEQ ID NO: 14632 - DNA, 21 bp, Homo sapiens
agggcaacttrctcatgtccc

SEQ ID NO: 14633 - DNA, 21 bp, Homo sapiens
ttcccttctaytcctatgaga

SEQ ID NO: 14634 - DNA, 21 bp, Homo sapiens
acacttttacmagttttacac

SEQ ID NO: 14635 - DNA, 21 bp, Homo sapiens
tatacctctartgaagcacag

SEQ ID NO: 14636 - DNA, 21 bp, Homo sapiens
aagccatctcragaggcatct

SEQ ID NO: 14637 - DNA, 21 bp, Homo sapiens
gtcattgtctyacagattaag

SEQ ID NO: 14638 - DNA, 21 bp, Homo sapiens
ccttaacaacraccttgttaa

SEQ ID NO: 14639 - DNA, 21 bp, Homo sapiens
caagaaaaaayattgcagaga

SEQ ID NO: 14640 - DNA, 21 bp, Homo sapiens
ttggttgacartcttaagata

SEQ ID NO: 14641 - DNA, 21 bp, Homo sapiens
ctcaaatggtrtaggaaaaat

SEQ ID NO: 14642 - DNA, 21 bp, Homo sapiens
cttcttccttrtgaaaacatc

SEQ ID NO: 14643 - DNA, 21 bp, Homo sapiens
atctctcgctyacactgccca

SEQ ID NO: 14644 - DNA, 21 bp, Homo sapiens
ctttggatagyggtgagttat

SEQ ID NO: 14645 - DNA, 21 bp, Homo sapiens
gcagacacccygagggaggtc

SEQ ID NO: 14646 - DNA, 21 bp, Homo sapiens
tatacctgggrgtagcattgc

SEQ ID NO: 14647 - DNA, 21 bp, Homo sapiens
gatgtacctcygtgagagtct

SEQ ID NO: 14648 - DNA, 21 bp, Homo sapiens
tgttggggccrtgttgctgac

SEQ ID NO: 14649 - DNA, 21 bp, Homo sapiens
gatcgcctacrgtcttcccca

SEQ ID NO: 14650 - DNA, 21 bp, Homo sapiens
agaagctgaargaacccacgt

SEQ ID NO: 14651 - DNA, 21 bp, Homo sapiens
actttcagggygacaggtctg

SEQ ID NO: 14652 - DNA, 21 bp, Homo sapiens
aacactatagyggctgaatta

SEQ ID NO: 14653 - DNA, 21 bp, Homo sapiens
gatgttaagarctcaacttaa

SEQ ID NO: 14654 - DNA, 21 bp, Homo sapiens
agaatagggaygaaagtatcc

SEQ ID NO: 14655 - DNA, 21 bp, Homo sapiens
gacagcatcaragagggcagc

SEQ ID NO: 14656 - DNA, 21 bp, Homo sapiens
gggtcctccgrctgtcagaag

SEQ ID NO: 14657 - DNA, 21 bp, Homo sapiens
ccttcattatrccagaaacat

SEQ ID NO: 14658 - DNA, 21 bp, Homo sapiens
cactacggacytcccccagct

SEQ ID NO: 14659 - DNA, 21 bp, Homo sapiens
gtgacagagtragacagactg

SEQ ID NO: 14660 - DNA, 21 bp, Homo sapiens
acatacttacyctgcttgctg

SEQ ID NO: 14661 - DNA, 21 bp, Homo sapiens
aataagcaaakaatggtagga

SEQ ID NO: 14662 - DNA, 21 bp, Homo sapiens
caagagtggtrtagccatttg

SEQ ID NO: 14663 - DNA, 21 bp, Homo sapiens
cctcacctaaragagactttc

SEQ ID NO: 14664 - DNA, 21 bp, Homo sapiens
gttctagtttycaccctcagg

SEQ ID NO: 14665 - DNA, 21 bp, Homo sapiens
atacttaaacrtatttatgga

SEQ ID NO: 14666 - DNA, 21 bp, Homo sapiens
atatcccacaygaggtccagt

SEQ ID NO: 14667 - DNA, 21 bp, Homo sapiens
aggagcagagygaatatttgc

SEQ ID NO: 14668 - DNA, 21 bp, Homo sapiens
tctagggaaarcacattgtga

SEQ ID NO: 14669 - DNA, 21 bp, Homo sapiens
tgacatcaaaytccagagata

SEQ ID NO: 14670 - DNA, 21 bp, Homo sapiens
gtaacttaaartgttagtgtt

SEQ ID NO: 14671 - DNA, 21 bp, Homo sapiens
tttaaaaaaarttagtgtact

SEQ ID NO: 14672 - DNA, 21 bp, Homo sapiens
tttaaaaaaaytgaaaccata

SEQ ID NO: 14673 - DNA, 21 bp, Homo sapiens
tatcttgtatraatggcttgc

SEQ ID NO: 14674 - DNA, 21 bp, Homo sapiens
catgttctcaytggataggga

SEQ ID NO: 14675 - DNA, 21 bp, Homo sapiens
acttgacaatkcagtgagtca

SEQ ID NO: 14676 - DNA, 21 bp, Homo sapiens
cttctgacccyggggtctggg

SEQ ID NO: 14677 - DNA, 21 bp, Homo sapiens
gcctgggcctyagcaataagc

SEQ ID NO: 14678 - DNA, 21 bp, Homo sapiens
cgggggcccartgagagtggc

SEQ ID NO: 14679 - DNA, 21 bp, Homo sapiens
gtggaggatamattgtaggga

SEQ ID NO: 14680 - DNA, 21 bp, Homo sapiens
gcttaagccartcccctctga

SEQ ID NO: 14681 - DNA, 21 bp, Homo sapiens
tgtgtgttggkgggggaataa

SEQ ID NO: 14682 - DNA, 21 bp, Homo sapiens
aggctgtggtrgatctggtag

SEQ ID NO: 14683 - DNA, 21 bp, Homo sapiens
tgcaagggctrtacccccgga

SEQ ID NO: 14684 - DNA, 21 bp, Homo sapiens
ctgaccaatamtttgtcccag

SEQ ID NO: 14685 - DNA, 21 bp, Homo sapiens
cgaggggtgamtggagagggc

SEQ ID NO: 14686 - DNA, 21 bp, Homo sapiens
ccatccccacytcccccacta

SEQ ID NO: 14687 - DNA, 21 bp, Homo sapiens
gtgcttcagaraatggaaatg

SEQ ID NO: 14688 - DNA, 21 bp, Homo sapiens
gtctggcaaaytgcattaggc

SEQ ID NO: 14689 - DNA, 21 bp, Homo sapiens
agagtgaccartgaggggcag

SEQ ID NO: 14690 - DNA, 21 bp, Homo sapiens
gagattcaaayatccatttca

SEQ ID NO: 14691 - DNA, 21 bp, Homo sapiens
gggtacaacartgcatattca

SEQ ID NO: 14692 - DNA, 21 bp, Homo sapiens
ggaaatcatcrttagaatgtc

SEQ ID NO: 14693 - DNA, 21 bp, Homo sapiens
catcatgatcragagagatgt

SEQ ID NO: 14694 - DNA, 21 bp, Homo sapiens
cccaaaaaaamccctctaaat

SEQ ID NO: 14695 - DNA, 21 bp, Homo sapiens
aaaatacaaayatggttaagc

SEQ ID NO: 14696 - DNA, 21 bp, Homo sapiens
tgcagatccaytttgcagaag

SEQ ID NO: 14697 - DNA, 21 bp, Homo sapiens
aggtaaatcartgaactcacc

SEQ ID NO: 14698 - DNA, 21 bp, Homo sapiens
taaaatagcartaatttttat

SEQ ID NO: 14699 - DNA, 21 bp, Homo sapiens
tctcaacattytgatccttct

SEQ ID NO: 14700 - DNA, 21 bp, Homo sapiens
aggcttctgcrcttcattaga

SEQ ID NO: 14701 - DNA, 21 bp, Homo sapiens
tggcagtgcaygatatctgac

SEQ ID NO: 14702 - DNA, 21 bp, Homo sapiens
tcatgagcttrgaaatactcc

SEQ ID NO: 14703 - DNA, 21 bp, Homo sapiens
ccaagtatctygatccaatct

SEQ ID NO: 14704 - DNA, 21 bp, Homo sapiens
gcattgttagyactctaacct

SEQ ID NO: 14705 - DNA, 21 bp, Homo sapiens
aggtcattctyagagggtgaa

SEQ ID NO: 14706 - DNA, 21 bp, Homo sapiens
ctttctctgamctcctggctg

SEQ ID NO: 14707 - DNA, 21 bp, Homo sapiens
atcaggcaggmaggtagcatt

SEQ ID NO: 14708 - DNA, 21 bp, Homo sapiens
caaaacaaagrgattggagag

SEQ ID NO: 14709 - DNA, 21 bp, Homo sapiens
gatattgaaakctataaggat

SEQ ID NO: 14710 - DNA, 21 bp, Homo sapiens
catggtaattrtcaatcatag

SEQ ID NO: 14711 - DNA, 21 bp, Homo sapiens
gcggcagaccrttcctacttc

SEQ ID NO: 14712 - DNA, 21 bp, Homo sapiens
cctcgtctccrtggaagttga

SEQ ID NO: 14713 - DNA, 21 bp, Homo sapiens
gggagaaactractccaaata

SEQ ID NO: 14714 - DNA, 21 bp, Homo sapiens
gagcatgattmagccataaaa

SEQ ID NO: 14715 - DNA, 21 bp, Homo sapiens
aggcaaaaggrtttcagaaaa

SEQ ID NO: 14716 - DNA, 21 bp, Homo sapiens
agatccttacratttagcctc

SEQ ID NO: 14717 - DNA, 21 bp, Homo sapiens
tgcacacatayccatgcagac

SEQ ID NO: 14718 - DNA, 21 bp, Homo sapiens
accatattcartgatattaaa

SEQ ID NO: 14719 - DNA, 21 bp, Homo sapiens
gtcacaccgaraagtcagttt

SEQ ID NO: 14720 - DNA, 21 bp, Homo sapiens
tctcattatgygatatacttc

SEQ ID NO: 14721 - DNA, 21 bp, Homo sapiens
agtgttgggayaactggctgt

SEQ ID NO: 14722 - DNA, 21 bp, Homo sapiens
gtgagatgggytgggcctcat

SEQ ID NO: 14723 - DNA, 21 bp, Homo sapiens
ctttggggggygtccacacac

SEQ ID NO: 14724 - DNA, 21 bp, Homo sapiens
cacacccacaygagcccttga

SEQ ID NO: 14725 - DNA, 21 bp, Homo sapiens
acgctctgtgkgaaagcacgg

SEQ ID NO: 14726 - DNA, 21 bp, Homo sapiens
taattaggccracgatgccca

SEQ ID NO: 14727 - DNA, 21 bp, Homo sapiens
tctgtagtgayagctcttgtg

SEQ ID NO: 14728 - DNA, 21 bp, Homo sapiens
tgggccttttytgtttcttta

SEQ ID NO: 14729 - DNA, 21 bp, Homo sapiens
ctgtcccctayaagtcactgt

SEQ ID NO: 14730 - DNA, 21 bp, Homo sapiens
cgtgaagtccrgggtcctgct

SEQ ID NO: 14731 - DNA, 21 bp, Homo sapiens
gagagatttgkatattggctg

SEQ ID NO: 14732 - DNA, 21 bp, Homo sapiens
tctaccagggygtactgtatg

SEQ ID NO: 14733 - DNA, 21 bp, Homo sapiens
ggacaatacaraccttattcc

SEQ ID NO: 14734 - DNA, 21 bp, Homo sapiens
ttttggagtamctcttaagag

SEQ ID NO: 14735 - DNA, 21 bp, Homo sapiens
gaatggcaccrtgtatcagga

SEQ ID NO: 14736 - DNA, 21 bp, Homo sapiens
tcttgcctttytctgtccctc

SEQ ID NO: 14737 - DNA, 21 bp, Homo sapiens
atttagtgggkcaggaatttg

SEQ ID NO: 14738 - DNA, 21 bp, Homo sapiens
tacatcagaakactttttgct

SEQ ID NO: 14739 - DNA, 21 bp, Homo sapiens
aacttgttgtyacaagttgaa

SEQ ID NO: 14740 - DNA, 21 bp, Homo sapiens
ccaatgtgagrgtgtgaaaga

SEQ ID NO: 14741 - DNA, 21 bp, Homo sapiens
gcataattagraaattttaat

SEQ ID NO: 14742 - DNA, 21 bp, Homo sapiens
taaggagagaygtgggagtgc

SEQ ID NO: 14743 - DNA, 21 bp, Homo sapiens
ccaaaattacyctcccatttc

SEQ ID NO: 14744 - DNA, 21 bp, Homo sapiens
aagctcagctmtgtgtcttag

SEQ ID NO: 14745 - DNA, 21 bp, Homo sapiens
agtccttaaartaatgagaaa

SEQ ID NO: 14746 - DNA, 21 bp, Homo sapiens
tttctcatacytaatggtcaa

SEQ ID NO: 14747 - DNA, 21 bp, Homo sapiens
aaagaaaagcrtgggtctgac

SEQ ID NO: 14748 - DNA, 21 bp, Homo sapiens
gagaattgttygtctgataca

SEQ ID NO: 14749 - DNA, 21 bp, Homo sapiens
gagatgtagtracagagaatg

SEQ ID NO: 14750 - DNA, 21 bp, Homo sapiens
accttcttctrtttagcatgg

SEQ ID NO: 14751 - DNA, 21 bp, Homo sapiens
tcaaataactrgttgtctaat

SEQ ID NO: 14752 - DNA, 21 bp, Homo sapiens
ttgctacttcytaaaaggtct

SEQ ID NO: 14753 - DNA, 21 bp, Homo sapiens
ataattaataygctaaaaact

SEQ ID NO: 14754 - DNA, 21 bp, Homo sapiens
aacaaggtgcygctgttggag

SEQ ID NO: 14755 - DNA, 21 bp, Homo sapiens
tgtattagtgrtgctatgctt

SEQ ID NO: 14756 - DNA, 21 bp, Homo sapiens
tgcaatatccktttgaataaa

SEQ ID NO: 14757 - DNA, 21 bp, Homo sapiens
tgcataaacamcttgaggcca

SEQ ID NO: 14758 - DNA, 21 bp, Homo sapiens
aaaagaaaggmaacagtttgg

SEQ ID NO: 14759 - DNA, 21 bp, Homo sapiens
aaacatttctmaaatcaattg

SEQ ID NO: 14760 - DNA, 21 bp, Homo sapiens
caaaatggggytataataatt

SEQ ID NO: 14761 - DNA, 21 bp, Homo sapiens
aaggataacarcaaatgtaaa

SEQ ID NO: 14762 - DNA, 21 bp, Homo sapiens
atagtggtgamtaaaataatg

SEQ ID NO: 14763 - DNA, 21 bp, Homo sapiens
cttttggggargtaaagcaga

SEQ ID NO: 14764 - DNA, 21 bp, Homo sapiens
ctgcagtcaakgtgtcagtag

SEQ ID NO: 14765 - DNA, 21 bp, Homo sapiens
tttttataatytccctagcca

SEQ ID NO: 14766 - DNA, 21 bp, Homo sapiens
tgtataatttrtgagggaatg

SEQ ID NO: 14767 - DNA, 21 bp, Homo sapiens
tattttcagayttaatcacag

SEQ ID NO: 14768 - DNA, 21 bp, Homo sapiens
tctgagcagayatattggaat

SEQ ID NO: 14769 - DNA, 21 bp, Homo sapiens
acactttttcytcgggaatat

SEQ ID NO: 14770 - DNA, 21 bp, Homo sapiens
gctagaagccyagtctggtgc

SEQ ID NO: 14771 - DNA, 21 bp, Homo sapiens
taatccatgcycttgattaat

SEQ ID NO: 14772 - DNA, 21 bp, Homo sapiens
tcctaataagyccatccaaat

SEQ ID NO: 14773 - DNA, 21 bp, Homo sapiens
ttctagtaccraaaagtaaga

SEQ ID NO: 14774 - DNA, 21 bp, Homo sapiens
gccataatgcraaataagcct

SEQ ID NO: 14775 - DNA, 21 bp, Homo sapiens
agaacctaatmgatacataca

SEQ ID NO: 14776 - DNA, 21 bp, Homo sapiens
caaaatacttyctttcatttt

SEQ ID NO: 14777 - DNA, 21 bp, Homo sapiens
ctatagaactrtaatagtctt

SEQ ID NO: 14778 - DNA, 21 bp, Homo sapiens
tatgttaccartctacagcga

SEQ ID NO: 14779 - DNA, 21 bp, Homo sapiens
aattctgttaycaagaattct

SEQ ID NO: 14780 - DNA, 21 bp, Homo sapiens
atgaggaaacktcaattacct

SEQ ID NO: 14781 - DNA, 21 bp, Homo sapiens
taaaccctttkggaaaaagac

SEQ ID NO: 14782 - DNA, 21 bp, Homo sapiens
ttgatatagtygagtaagcgg

SEQ ID NO: 14783 - DNA, 21 bp, Homo sapiens
actggaactayagaaattcat

SEQ ID NO: 14784 - DNA, 21 bp, Homo sapiens
ttgggaaaacrgtcaccttct

SEQ ID NO: 14785 - DNA, 21 bp, Homo sapiens
ggcagaaaggygaaaggcctt

SEQ ID NO: 14786 - DNA, 21 bp, Homo sapiens
tttttaagtaygcatccattg

SEQ ID NO: 14787 - DNA, 21 bp, Homo sapiens
ccatgacaaarcccttgtatc

SEQ ID NO: 14788 - DNA, 21 bp, Homo sapiens
aaactcaggaragaggatagt

SEQ ID NO: 14789 - DNA, 21 bp, Homo sapiens
aattgcaaggyagattgagaa

SEQ ID NO: 14790 - DNA, 21 bp, Homo sapiens
gaaaaaatacytcatgcattt

SEQ ID NO: 14791 - DNA, 21 bp, Homo sapiens
gtgctttccartatcttcgct

SEQ ID NO: 14792 - DNA, 21 bp, Homo sapiens
cggtttcttgyattcttccac

SEQ ID NO: 14793 - DNA, 21 bp, Homo sapiens
aggtcctgttygttctcatat

SEQ ID NO: 14794 - DNA, 21 bp, Homo sapiens
gttaattcagrgttgattctt

SEQ ID NO: 14795 - DNA, 21 bp, Homo sapiens
aatcataatgycacatctaac

SEQ ID NO: 14796 - DNA, 21 bp, Homo sapiens
gattcatgttraagtaaatca

SEQ ID NO: 14797 - DNA, 21 bp, Homo sapiens
tcacaaagaaraccactgtcc

SEQ ID NO: 14798 - DNA, 21 bp, Homo sapiens
taggccatgckaaattaaact

SEQ ID NO: 14799 - DNA, 21 bp, Homo sapiens
catctttataytgagcttatt

SEQ ID NO: 14800 - DNA, 21 bp, Homo sapiens
gtaactaaaaragtaattttc

SEQ ID NO: 14801 - DNA, 21 bp, Homo sapiens
ttttataaccrtcctcaaggt

SEQ ID NO: 14802 - DNA, 21 bp, Homo sapiens
attttttaagytttttattta

SEQ ID NO: 14803 - DNA, 21 bp, Homo sapiens
cacagtcacakgttcctgtga

SEQ ID NO: 14804 - DNA, 21 bp, Homo sapiens
tagttcagtcrtataggtctg

SEQ ID NO: 14805 - DNA, 21 bp, Homo sapiens
tttatgatttrtgaaaaaagt

SEQ ID NO: 14806 - DNA, 21 bp, Homo sapiens
caattatgcarttcccttctg

SEQ ID NO: 14807 - DNA, 21 bp, Homo sapiens
agacttaaaamgtcaagtagt

SEQ ID NO: 14808 - DNA, 21 bp, Homo sapiens
tcagatatgtrtgcctcatct

SEQ ID NO: 14809 - DNA, 21 bp, Homo sapiens
gtatcccaacrttataaacat

SEQ ID NO: 14810 - DNA, 21 bp, Homo sapiens
agtctaacaaytatatgaaca

SEQ ID NO: 14811 - DNA, 21 bp, Homo sapiens
acttaattacktttgttctct

SEQ ID NO: 14812 - DNA, 21 bp, Homo sapiens
attgcttttcrtgcttaactt

SEQ ID NO: 14813 - DNA, 21 bp, Homo sapiens
gaggtggtgcytatgatttta

SEQ ID NO: 14814 - DNA, 21 bp, Homo sapiens
taagtggcagkagctttcctt

SEQ ID NO: 14815 - DNA, 21 bp, Homo sapiens
gtgctctatcrtgtgtttgat

SEQ ID NO: 14816 - DNA, 21 bp, Homo sapiens
ctatggccacyttccatttgt

SEQ ID NO: 14817 - DNA, 21 bp, Homo sapiens
gaacgctatcrcagtgttgac

SEQ ID NO: 14818 - DNA, 21 bp, Homo sapiens
ttttatgtctyagtgattatt

SEQ ID NO: 14819 - DNA, 21 bp, Homo sapiens
attgcatccakgatttttcaa

SEQ ID NO: 14820 - DNA, 21 bp, Homo sapiens
ccctcatgacycagtcacttg

SEQ ID NO: 14821 - DNA, 21 bp, Homo sapiens
aattctcatgmaccaccactg

SEQ ID NO: 14822 - DNA, 21 bp, Homo sapiens
aattcctctaygtgtatgtgt

SEQ ID NO: 14823 - DNA, 21 bp, Homo sapiens
tatcatttacrctatttgtcc

SEQ ID NO: 14824 - DNA, 21 bp, Homo sapiens
gtatttgatayggtggcttta

SEQ ID NO: 14825 - DNA, 21 bp, Homo sapiens
ttttccttttyctgagtctac

SEQ ID NO: 14826 - DNA, 21 bp, Homo sapiens
acatttatttmatttgatcac

SEQ ID NO: 14827 - DNA, 21 bp, Homo sapiens
tttttcaaatmactaggtcaa

SEQ ID NO: 14828 - DNA, 21 bp, Homo sapiens
actactgaccytaaaatagtg

SEQ ID NO: 14829 - DNA, 21 bp, Homo sapiens
taaagctagtyagttctagat

SEQ ID NO: 14830 - DNA, 21 bp, Homo sapiens
cagaatcccakatagcaagac

SEQ ID NO: 14831 - DNA, 21 bp, Homo sapiens
gtgtgggaaakaaaatggata

SEQ ID NO: 14832 - DNA, 21 bp, Homo sapiens
gagacaactgrttagaaaagt

SEQ ID NO: 14833 - DNA, 21 bp, Homo sapiens
gtgcttgcacrcgcatgtgtg

SEQ ID NO: 14834 - DNA, 21 bp, Homo sapiens
aggtggcttcyaattcaccat

SEQ ID NO: 14835 - DNA, 21 bp, Homo sapiens
acaattgtggrcatgcattca

SEQ ID NO: 14836 - DNA, 21 bp, Homo sapiens
atttgagtgtrtgggagggtg

SEQ ID NO: 14837 - DNA, 21 bp, Homo sapiens
ccatcacccarttttaaatgt

SEQ ID NO: 14838 - DNA, 21 bp, Homo sapiens
tagaacttgargtgtggattg

SEQ ID NO: 14839 - DNA, 21 bp, Homo sapiens
caaaggtaaarcaataaaaaa

SEQ ID NO: 14840 - DNA, 21 bp, Homo sapiens
tcaattgctamatgtaaattt

SEQ ID NO: 14841 - DNA, 21 bp, Homo sapiens
ttctataaaakaagaaagaat

SEQ ID NO: 14842 - DNA, 21 bp, Homo sapiens
ctgtataagcytggtgaaaca

SEQ ID NO: 14843 - DNA, 21 bp, Homo sapiens
acatgaaaggmaataagtgca

SEQ ID NO: 14844 - DNA, 21 bp, Homo sapiens
ttttgagttaraggttaatga

SEQ ID NO: 14845 - DNA, 21 bp, Homo sapiens
tacacctttargcaaaaatta

SEQ ID NO: 14846 - DNA, 21 bp, Homo sapiens
tgaacaaaatktagctgaatt

SEQ ID NO: 14847 - DNA, 21 bp, Homo sapiens
gaggtgaagcrttttgtgaag

SEQ ID NO: 14848 - DNA, 21 bp, Homo sapiens
tctgatcaccraatatttttt

SEQ ID NO: 14849 - DNA, 21 bp, Homo sapiens
gtgtgagaatraactaaaaca

SEQ ID NO: 14850 - DNA, 21 bp, Homo sapiens
gagcacagctygccatgacag

SEQ ID NO: 14851 - DNA, 21 bp, Homo sapiens
agtaattaaargtatctacaa

SEQ ID NO: 14852 - DNA, 21 bp, Homo sapiens
tccgtatcctrtgtcatttga

SEQ ID NO: 14853 - DNA, 21 bp, Homo sapiens
ataaagttggycttctggcat

SEQ ID NO: 14854 - DNA, 21 bp, Homo sapiens
agagtcttacytgctccagct

SEQ ID NO: 14855 - DNA, 21 bp, Homo sapiens
cgggcttactkccaactgtta

SEQ ID NO: 14856 - DNA, 21 bp, Homo sapiens
acactaatcarcttcatgtga

SEQ ID NO: 14857 - DNA, 21 bp, Homo sapiens
gaggaatgaayattgttagaa

SEQ ID NO: 14858 - DNA, 21 bp, Homo sapiens
cttgaaaccayaaggagttcc

SEQ ID NO: 14859 - DNA, 21 bp, Homo sapiens
cgtcaaccccyattaaatctg

SEQ ID NO: 14860 - DNA, 21 bp, Homo sapiens
ttcccttttcmctgcaaacta

SEQ ID NO: 14861 - DNA, 21 bp, Homo sapiens
aagtgacagayggttaaaaaa

SEQ ID NO: 14862 - DNA, 21 bp, Homo sapiens
ttatttgtacrttgctacata

SEQ ID NO: 14863 - DNA, 21 bp, Homo sapiens
attattcagakgcataaccca

SEQ ID NO: 14864 - DNA, 21 bp, Homo sapiens
tttttgcatcyatatttagaa

SEQ ID NO: 14865 - DNA, 21 bp, Homo sapiens
ttaactaaacytatagtttat

SEQ ID NO: 14866 - DNA, 21 bp, Homo sapiens
catttataaamcatttggttt

SEQ ID NO: 14867 - DNA, 21 bp, Homo sapiens
tatcagcagtyaaagtgtcca

SEQ ID NO: 14868 - DNA, 21 bp, Homo sapiens
taggcattttyataatcaaga

SEQ ID NO: 14869 - DNA, 21 bp, Homo sapiens
gcaccgcaacyaagtaaaatt

SEQ ID NO: 14870 - DNA, 21 bp, Homo sapiens
taattgtacarttttatttac

SEQ ID NO: 14871 - DNA, 21 bp, Homo sapiens
gaaaacattcrtggatagccc

SEQ ID NO: 14872 - DNA, 21 bp, Homo sapiens
ttcaagtagakagtgaacttc

SEQ ID NO: 14873 - DNA, 21 bp, Homo sapiens
caaaaccctgraacatttcct

SEQ ID NO: 14874 - DNA, 21 bp, Homo sapiens
taatgctccartttggaactg

SEQ ID NO: 14875 - DNA, 21 bp, Homo sapiens
catgagttacrgctgtcagtc

SEQ ID NO: 14876 - DNA, 21 bp, Homo sapiens
ttccaatccarctgtatgtta

SEQ ID NO: 14877 - DNA, 21 bp, Homo sapiens
ggaactcacaktattgacagc

SEQ ID NO: 14878 - DNA, 21 bp, Homo sapiens
gagttaggctrgtaagtagag

SEQ ID NO: 14879 - DNA, 21 bp, Homo sapiens
agtgagggtcratctcaaaaa

SEQ ID NO: 14880 - DNA, 21 bp, Homo sapiens
caccttcccartaagggcttg

SEQ ID NO: 14881 - DNA, 21 bp, Homo sapiens
aagtaaattayggagtatggt

SEQ ID NO: 14882 - DNA, 21 bp, Homo sapiens
ggcctcagccygtgaacgcag

SEQ ID NO: 14883 - DNA, 21 bp, Homo sapiens
ctctcactgayatcaaactat

SEQ ID NO: 14884 - DNA, 21 bp, Homo sapiens
caagtcccacrgtcttttctc

SEQ ID NO: 14885 - DNA, 21 bp, Homo sapiens
ttaagtcttamtgcagagatg

SEQ ID NO: 14886 - DNA, 21 bp, Homo sapiens
ggctttgcccmcgtgaggtta

SEQ ID NO: 14887 - DNA, 21 bp, Homo sapiens
tgctgtcttcygtagattccc

SEQ ID NO: 14888 - DNA, 21 bp, Homo sapiens
atgaaggacakttggccatga

SEQ ID NO: 14889 - DNA, 21 bp, Homo sapiens
ataaatttacygtgtgaatca

SEQ ID NO: 14890 - DNA, 21 bp, Homo sapiens
agaactcagcractagctgtc

SEQ ID NO: 14891 - DNA, 21 bp, Homo sapiens
atatgaaaaayaaaaaccaca

SEQ ID NO: 14892 - DNA, 21 bp, Homo sapiens
aaagagctaartgagagcaaa

SEQ ID NO: 14893 - DNA, 21 bp, Homo sapiens
aaaagaaaaarccagagagaa

SEQ ID NO: 14894 - DNA, 21 bp, Homo sapiens
tcctttcttcygattcatatt

SEQ ID NO: 14895 - DNA, 21 bp, Homo sapiens
gaactgacatyaaacaattag

SEQ ID NO: 14896 - DNA, 21 bp, Homo sapiens
tgagactgatrcaattcagat

SEQ ID NO: 14897 - DNA, 21 bp, Homo sapiens
ggctggagaartataaagtta

SEQ ID NO: 14898 - DNA, 21 bp, Homo sapiens
agtcatctcaygctcgcggag

SEQ ID NO: 14899 - DNA, 21 bp, Homo sapiens
ctggcttggcytctattccat

SEQ ID NO: 14900 - DNA, 21 bp, Homo sapiens
gcctcttagcmccaaatatgg

SEQ ID NO: 14901 - DNA, 21 bp, Homo sapiens
ttttgttgaartcttaatatt

SEQ ID NO: 14902 - DNA, 21 bp, Homo sapiens
aaagatgtacmttagtagaga

SEQ ID NO: 14903 - DNA, 21 bp, Homo sapiens
gtggggaaaargagttgaagt

SEQ ID NO: 14904 - DNA, 21 bp, Homo sapiens
ttcacttataytggcattgtt

SEQ ID NO: 14905 - DNA, 21 bp, Homo sapiens
gattccaagarcattcatgac

SEQ ID NO: 14906 - DNA, 21 bp, Homo sapiens
gcatcatgagygctatgacaa

SEQ ID NO: 14907 - DNA, 21 bp, Homo sapiens
gtacagatacraaagttgaac

SEQ ID NO: 14908 - DNA, 21 bp, Homo sapiens
ggtgtaggtgrtgccacatta

SEQ ID NO: 14909 - DNA, 21 bp, Homo sapiens
attagccaatracttatttca

SEQ ID NO: 14910 - DNA, 21 bp, Homo sapiens
tttcagaaatktaaacacttt

SEQ ID NO: 14911 - DNA, 21 bp, Homo sapiens
ctcccttttayttttttgagc

SEQ ID NO: 14912 - DNA, 21 bp, Homo sapiens
ctcctgctgaytggtttgtag

SEQ ID NO: 14913 - DNA, 21 bp, Homo sapiens
gggctagcagycctagaaatt

SEQ ID NO: 14914 - DNA, 21 bp, Homo sapiens
tgtcagctctygttaggagcg

SEQ ID NO: 14915 - DNA, 21 bp, Homo sapiens
tccttgtttcrccaaatctgt

SEQ ID NO: 14916 - DNA, 21 bp, Homo sapiens
ttgttcttggracccaaacac

SEQ ID NO: 14917 - DNA, 21 bp, Homo sapiens
gtttctcagaragaactggta

SEQ ID NO: 14918 - DNA, 21 bp, Homo sapiens
tgtagggagaragaggcttga

SEQ ID NO: 14919 - DNA, 21 bp, Homo sapiens
tcctgtgaagmctcaaagcca

SEQ ID NO: 14920 - DNA, 21 bp, Homo sapiens
ggaggtggaaracagagggat

SEQ ID NO: 14921 - DNA, 21 bp, Homo sapiens
cttgagatcgycctccatctt

SEQ ID NO: 14922 - DNA, 21 bp, Homo sapiens
cccttagcaamttgttcttgg

SEQ ID NO: 14923 - DNA, 21 bp, Homo sapiens
agtaattccayttgctgagat

SEQ ID NO: 14924 - DNA, 21 bp, Homo sapiens
tagtatcaaayaatcagtggg

SEQ ID NO: 14925 - DNA, 21 bp, Homo sapiens
gtatcccctcyttgtgcttga

SEQ ID NO: 14926 - DNA, 21 bp, Homo sapiens
attcctgcaaraaaatctaga

SEQ ID NO: 14927 - DNA, 21 bp, Homo sapiens
aataactcctyattcctctcc

SEQ ID NO: 14928 - DNA, 21 bp, Homo sapiens
gatagctctcrgtgtgagttg

SEQ ID NO: 14929 - DNA, 21 bp, Homo sapiens
taaacaactarccaaaacaac

SEQ ID NO: 14930 - DNA, 21 bp, Homo sapiens
aacaggttatygagaaaccga

SEQ ID NO: 14931 - DNA, 21 bp, Homo sapiens
tgtcatgagcrgtcagtataa

SEQ ID NO: 14932 - DNA, 21 bp, Homo sapiens
ttgctgacagygtaagattgg

SEQ ID NO: 14933 - DNA, 21 bp, Homo sapiens
gtttcaaaatmtaatgctcag

SEQ ID NO: 14934 - DNA, 21 bp, Homo sapiens
tgtaaagactrccaaagaggg

SEQ ID NO: 14935 - DNA, 21 bp, Homo sapiens
ttgtattgggraaaaaaacta

SEQ ID NO: 14936 - DNA, 21 bp, Homo sapiens
gtcacttaggygagagtgcag

SEQ ID NO: 14937 - DNA, 21 bp, Homo sapiens
cttttgagacrcataacctat

SEQ ID NO: 14938 - DNA, 21 bp, Homo sapiens
tttactagatkcttatttgtc

SEQ ID NO: 14939 - DNA, 21 bp, Homo sapiens
tgctttttcaytgtcaattaa

SEQ ID NO: 14940 - DNA, 21 bp, Homo sapiens
aatacccaagyacattctcac

SEQ ID NO: 14941 - DNA, 21 bp, Homo sapiens
tctggctatcytcttaggtct

SEQ ID NO: 14942 - DNA, 21 bp, Homo sapiens
tgctaaacacrgggctttcca

SEQ ID NO: 14943 - DNA, 21 bp, Homo sapiens
caagatattcrtttctttctg

SEQ ID NO: 14944 - DNA, 21 bp, Homo sapiens
ttataaacttrgcttgattag

SEQ ID NO: 14945 - DNA, 21 bp, Homo sapiens
gttaccagacmagaccatagt

SEQ ID NO: 14946 - DNA, 21 bp, Homo sapiens
tcttcacccaytctaatgtct

SEQ ID NO: 14947 - DNA, 21 bp, Homo sapiens
atgaataagaraactggaaat

SEQ ID NO: 14948 - DNA, 21 bp, Homo sapiens
actaaaaattyttattcttga

SEQ ID NO: 14949 - DNA, 21 bp, Homo sapiens
ggctccctcayagcactgtgc

SEQ ID NO: 14950 - DNA, 21 bp, Homo sapiens
agccgttccgytgtcaatgct

SEQ ID NO: 14951 - DNA, 21 bp, Homo sapiens
tgggaactcayggctccatga

SEQ ID NO: 14952 - DNA, 21 bp, Homo sapiens
ataggagttamagaaaaacta

SEQ ID NO: 14953 - DNA, 21 bp, Homo sapiens
cctctccaagmtcatgtacta

SEQ ID NO: 14954 - DNA, 21 bp, Homo sapiens
tgtcatcactyattttcagca

SEQ ID NO: 14955 - DNA, 21 bp, Homo sapiens
cttgaaggacrtgtacgttca

SEQ ID NO: 14956 - DNA, 21 bp, Homo sapiens
gtaggcatgtraagatcatca

SEQ ID NO: 14957 - DNA, 21 bp, Homo sapiens
aaagccagaartagtcagctt

SEQ ID NO: 14958 - DNA, 21 bp, Homo sapiens
tcctcgtaagycaaattattt

SEQ ID NO: 14959 - DNA, 21 bp, Homo sapiens
ccttgatactrtaagtataca

SEQ ID NO: 14960 - DNA, 21 bp, Homo sapiens
ttcaaggactrtgggttcaga

SEQ ID NO: 14961 - DNA, 21 bp, Homo sapiens
aatcctgttgkagtagtcgag

SEQ ID NO: 14962 - DNA, 21 bp, Homo sapiens
acagaggaggygcaacttgtc

SEQ ID NO: 14963 - DNA, 21 bp, Homo sapiens
ctagcaatcamatgagttata

SEQ ID NO: 14964 - DNA, 21 bp, Homo sapiens
cagaaagaagygatgaggcat

SEQ ID NO: 14965 - DNA, 21 bp, Homo sapiens
atgcaataaartaaaatacaa

SEQ ID NO: 14966 - DNA, 21 bp, Homo sapiens
tgaactcaagytatgcttatg

SEQ ID NO: 14967 - DNA, 21 bp, Homo sapiens
tccctgccttrtagatagaaa

SEQ ID NO: 14968 - DNA, 21 bp, Homo sapiens
accccataacytagaaactta

SEQ ID NO: 14969 - DNA, 21 bp, Homo sapiens
atgataccttytgctccacct

SEQ ID NO: 14970 - DNA, 21 bp, Homo sapiens
atgttcttcayaattaagata

SEQ ID NO: 14971 - DNA, 21 bp, Homo sapiens
accaacaaagmaaaaagatga

SEQ ID NO: 14972 - DNA, 21 bp, Homo sapiens
aatttggtagrggtaatctga

SEQ ID NO: 14973 - DNA, 21 bp, Homo sapiens
aatcctgagcrtatcattgct

SEQ ID NO: 14974 - DNA, 21 bp, Homo sapiens
atggagaacarggtagtgtca

SEQ ID NO: 14975 - DNA, 21 bp, Homo sapiens
ctttgacttgkctatacagtt

SEQ ID NO: 14976 - DNA, 21 bp, Homo sapiens
agggaaggagkgggctaaggg

SEQ ID NO: 14977 - DNA, 21 bp, Homo sapiens
tgtatttgcayagtatcattt

SEQ ID NO: 14978 - DNA, 21 bp, Homo sapiens
gcatagccaaycctagaatcg

SEQ ID NO: 14979 - DNA, 21 bp, Homo sapiens
acccttcggtmaagactccct

SEQ ID NO: 14980 - DNA, 21 bp, Homo sapiens
gcattcaactrtagccaagat

SEQ ID NO: 14981 - DNA, 21 bp, Homo sapiens
ttaagcaggaygagctacata

SEQ ID NO: 14982 - DNA, 21 bp, Homo sapiens
tcaacactacyacctagtaaa

SEQ ID NO: 14983 - DNA, 21 bp, Homo sapiens
tcagttatagyaacaaccgtc

SEQ ID NO: 14984 - DNA, 21 bp, Homo sapiens
tagctaattaygaaaacaacc

SEQ ID NO: 14985 - DNA, 21 bp, Homo sapiens
cttgtatccartttgaagttg

SEQ ID NO: 14986 - DNA, 21 bp, Homo sapiens
atttaccactyttccaagtat

SEQ ID NO: 14987 - DNA, 21 bp, Homo sapiens
gtggtgagccygctgtgctgc

SEQ ID NO: 14988 - DNA, 21 bp, Homo sapiens
aaggatgatcktacagagaac

SEQ ID NO: 14989 - DNA, 21 bp, Homo sapiens
aaccacgtagyctctttatgt

SEQ ID NO: 14990 - DNA, 21 bp, Homo sapiens
ttaccagatayagcaggcata

SEQ ID NO: 14991 - DNA, 21 bp, Homo sapiens
gaactgtccartagattttag

SEQ ID NO: 14992 - DNA, 21 bp, Homo sapiens
gaaactgtcayttccagttat

SEQ ID NO: 14993 - DNA, 21 bp, Homo sapiens
gaatttatctrcttggatcac

SEQ ID NO: 14994 - DNA, 21 bp, Homo sapiens
cttcattgtgraaaggaaaat

SEQ ID NO: 14995 - DNA, 21 bp, Homo sapiens
atatagaaagktatattagga

SEQ ID NO: 14996 - DNA, 21 bp, Homo sapiens
gattttctccrcctgagagcc

SEQ ID NO: 14997 - DNA, 21 bp, Homo sapiens
gtgaaatgtcrtcagatgtca

SEQ ID NO: 14998 - DNA, 21 bp, Homo sapiens
accatgaattrttacataaac

SEQ ID NO: 14999 - DNA, 21 bp, Homo sapiens
agtgacattgkttaaatagaa

SEQ ID NO: 15000 - DNA, 21 bp, Homo sapiens
gagcagttgcmattttaaata

SEQ ID NO: 15001 - DNA, 21 bp, Homo sapiens
tcaactttatygtatgtgata

SEQ ID NO: 15002 - DNA, 21 bp, Homo sapiens
atgctgttagytattattata

SEQ ID NO: 15003 - DNA, 21 bp, Homo sapiens
tcatataaccrtttctatatc

SEQ ID NO: 15004 - DNA, 21 bp, Homo sapiens
gattttagctmatttttttcc

SEQ ID NO: 15005 - DNA, 21 bp, Homo sapiens
acagatttatygtggtataat

SEQ ID NO: 15006 - DNA, 21 bp, Homo sapiens
agacagggcaytggcatagga

SEQ ID NO: 15007 - DNA, 21 bp, Homo sapiens
taggtatgcaygtaagattcc

SEQ ID NO: 15008 - DNA, 21 bp, Homo sapiens
ctgcttggaarcaaccaggga

SEQ ID NO: 15009 - DNA, 21 bp, Homo sapiens
aatgcacttamatttgtttct

SEQ ID NO: 15010 - DNA, 21 bp, Homo sapiens
ttagacaaacmtggctttcat

SEQ ID NO: 15011 - DNA, 21 bp, Homo sapiens
ataaagccaaragtctgtcct

SEQ ID NO: 15012 - DNA, 21 bp, Homo sapiens
gagtctgtccyctgctattat

SEQ ID NO: 15013 - DNA, 21 bp, Homo sapiens
gactttatccyaagttactca

SEQ ID NO: 15014 - DNA, 21 bp, Homo sapiens
tctgagtattygcttgactca

SEQ ID NO: 15015 - DNA, 21 bp, Homo sapiens
aaatctctcargaattataaa

SEQ ID NO: 15016 - DNA, 21 bp, Homo sapiens
agacagccacmattatgcctg

SEQ ID NO: 15017 - DNA, 21 bp, Homo sapiens
caaaggtacartaatcaagac

SEQ ID NO: 15018 - DNA, 21 bp, Homo sapiens
ctataattccrtatgctaagc

SEQ ID NO: 15019 - DNA, 21 bp, Homo sapiens
gactaagaagrcttactgatt

SEQ ID NO: 15020 - DNA, 21 bp, Homo sapiens
cacttaccacrgaggtccatt

SEQ ID NO: 15021 - DNA, 21 bp, Homo sapiens
acctaaatatmcaacaaatga

SEQ ID NO: 15022 - DNA, 21 bp, Homo sapiens
agcttacagarttaattttag

SEQ ID NO: 15023 - DNA, 21 bp, Homo sapiens
ggacttttatyatacatcttg

SEQ ID NO: 15024 - DNA, 21 bp, Homo sapiens
agttatcctcrgtgggggact

SEQ ID NO: 15025 - DNA, 21 bp, Homo sapiens
tatccaatacygtaatgcaga

SEQ ID NO: 15026 - DNA, 21 bp, Homo sapiens
aagtgagagaratctacattg

SEQ ID NO: 15027 - DNA, 21 bp, Homo sapiens
ccatacccttmcactcatgcc

SEQ ID NO: 15028 - DNA, 21 bp, Homo sapiens
attcccaaagyaaataaatgt

SEQ ID NO: 15029 - DNA, 21 bp, Homo sapiens
ctcagagaaakagggagagag

SEQ ID NO: 15030 - DNA, 21 bp, Homo sapiens
ttcttgataayggggaaagct

SEQ ID NO: 15031 - DNA, 21 bp, Homo sapiens
agctacaatamtcacatttct

SEQ ID NO: 15032 - DNA, 21 bp, Homo sapiens
gcatagtatcmtgtaaagcag

SEQ ID NO: 15033 - DNA, 21 bp, Homo sapiens
tcttgtgtttyggaacattag

SEQ ID NO: 15034 - DNA, 21 bp, Homo sapiens
ttagaattaaygatcttctat

SEQ ID NO: 15035 - DNA, 21 bp, Homo sapiens
gaactgcatakaagcactgta

SEQ ID NO: 15036 - DNA, 21 bp, Homo sapiens
gtgtgagtctyctgatgggcc

SEQ ID NO: 15037 - DNA, 21 bp, Homo sapiens
tttaccaagarccatgtagat

SEQ ID NO: 15038 - DNA, 21 bp, Homo sapiens
taaaaaatgtraacagggtaa

SEQ ID NO: 15039 - DNA, 21 bp, Homo sapiens
ggcaaaaataygtacttgata

SEQ ID NO: 15040 - DNA, 21 bp, Homo sapiens
tacctttgaaygaaaaactct

SEQ ID NO: 15041 - DNA, 21 bp, Homo sapiens
ctgttttaatracattaatta

SEQ ID NO: 15042 - DNA, 21 bp, Homo sapiens
agcctagagayttaatgctta

SEQ ID NO: 15043 - DNA, 21 bp, Homo sapiens
attttatgggygggtgccaaa

SEQ ID NO: 15044 - DNA, 21 bp, Homo sapiens
taacatgtttrtgaatagaaa

SEQ ID NO: 15045 - DNA, 21 bp, Homo sapiens
acaacccaaaygtctatcaat

SEQ ID NO: 15046 - DNA, 21 bp, Homo sapiens
catcagcttcygtgattctaa

SEQ ID NO: 15047 - DNA, 21 bp, Homo sapiens
ttggggatttyggcattcata

SEQ ID NO: 15048 - DNA, 21 bp, Homo sapiens
tgcagtatgtkgcacttatat

SEQ ID NO: 15049 - DNA, 21 bp, Homo sapiens
agagtgatgayaggagaacag

SEQ ID NO: 15050 - DNA, 21 bp, Homo sapiens
gttgatgaatmtttaggtgga

SEQ ID NO: 15051 - DNA, 21 bp, Homo sapiens
aggttgagggygctggcaaca

SEQ ID NO: 15052 - DNA, 21 bp, Homo sapiens
ctactctaaaygtttaactct

SEQ ID NO: 15053 - DNA, 21 bp, Homo sapiens
gggctcggtgmagagaagaag

SEQ ID NO: 15054 - DNA, 21 bp, Homo sapiens
aataaaagatrctgttaattg

SEQ ID NO: 15055 - DNA, 21 bp, Homo sapiens
gactcccaagrtaatcaattc

SEQ ID NO: 15056 - DNA, 21 bp, Homo sapiens
attaccattcygttgtctcct

SEQ ID NO: 15057 - DNA, 21 bp, Homo sapiens
atcctctcggyaaaacagaca

SEQ ID NO: 15058 - DNA, 21 bp, Homo sapiens
cttcattcatycctctcttct

SEQ ID NO: 15059 - DNA, 21 bp, Homo sapiens
cactgtgtgcycttctcagga

SEQ ID NO: 15060 - DNA, 21 bp, Homo sapiens
aagctggaaartctacctctg

SEQ ID NO: 15061 - DNA, 21 bp, Homo sapiens
cactgaacttmtgtgtgctgc

SEQ ID NO: 15062 - DNA, 21 bp, Homo sapiens
ttttacaaatygcaacatcga

SEQ ID NO: 15063 - DNA, 21 bp, Homo sapiens
tacattacttrgatctctcaa

SEQ ID NO: 15064 - DNA, 21 bp, Homo sapiens
gtgccacactktggaatcttt

SEQ ID NO: 15065 - DNA, 21 bp, Homo sapiens
aggagatttcyaaagaaaatg

SEQ ID NO: 15066 - DNA, 21 bp, Homo sapiens
acaaatttatygccaaattta

SEQ ID NO: 15067 - DNA, 21 bp, Homo sapiens
tagtccatttrtactgctata

SEQ ID NO: 15068 - DNA, 21 bp, Homo sapiens
aagcatctgtytggttctcag

SEQ ID NO: 15069 - DNA, 21 bp, Homo sapiens
aaattaagatmgtaaaatttg

SEQ ID NO: 15070 - DNA, 21 bp, Homo sapiens
agagccaaagrgtccatatta

SEQ ID NO: 15071 - DNA, 21 bp, Homo sapiens
actggaaattrggaaaaagct

SEQ ID NO: 15072 - DNA, 21 bp, Homo sapiens
tatcaactggraaaattagat

SEQ ID NO: 15073 - DNA, 21 bp, Homo sapiens
attgggagatkagatttatca

SEQ ID NO: 15074 - DNA, 21 bp, Homo sapiens
ttaaggaaacytaaacacatc

SEQ ID NO: 15075 - DNA, 21 bp, Homo sapiens
catctggcacyttatcaataa

SEQ ID NO: 15076 - DNA, 21 bp, Homo sapiens
taacgtgtgcytttctttggt

SEQ ID NO: 15077 - DNA, 21 bp, Homo sapiens
aagaggaaacrtaaggagaag

SEQ ID NO: 15078 - DNA, 21 bp, Homo sapiens
acttacttctrtaaggatcag

SEQ ID NO: 15079 - DNA, 21 bp, Homo sapiens
tctgaagacaractctataat

SEQ ID NO: 15080 - DNA, 21 bp, Homo sapiens
ctcatgcagartgagagtaaa

SEQ ID NO: 15081 - DNA, 21 bp, Homo sapiens
ttcatgttgcygatctggctg

SEQ ID NO: 15082 - DNA, 21 bp, Homo sapiens
ttagcatagaytgttttattt

SEQ ID NO: 15083 - DNA, 21 bp, Homo sapiens
tttcttgagarcaagtgacat

SEQ ID NO: 15084 - DNA, 21 bp, Homo sapiens
agacatggggyatagaaatga

SEQ ID NO: 15085 - DNA, 21 bp, Homo sapiens
tgtagagggayaaacagcctc

SEQ ID NO: 15086 - DNA, 21 bp, Homo sapiens
ttgcattagcyggaaaggtat

SEQ ID NO: 15087 - DNA, 21 bp, Homo sapiens
gttcattctcraggcaataga

SEQ ID NO: 15088 - DNA, 21 bp, Homo sapiens
ccagccacackgaactctaaa

SEQ ID NO: 15089 - DNA, 21 bp, Homo sapiens
aagtgttgaayggatgtgact

SEQ ID NO: 15090 - DNA, 21 bp, Homo sapiens
attgtactggytagactttag

SEQ ID NO: 15091 - DNA, 21 bp, Homo sapiens
tctacctctcrcttcttcttt

SEQ ID NO: 15092 - DNA, 21 bp, Homo sapiens
ccatttgactmgaagttagaa

SEQ ID NO: 15093 - DNA, 21 bp, Homo sapiens
gagtggaagartagtgtccaa

SEQ ID NO: 15094 - DNA, 21 bp, Homo sapiens
atgtgtgctartgttctggtc

SEQ ID NO: 15095 - DNA, 21 bp, Homo sapiens
ccaatttttgracctcataat

SEQ ID NO: 15096 - DNA, 21 bp, Homo sapiens
agccaaatccmaggaaatatc

SEQ ID NO: 15097 - DNA, 21 bp, Homo sapiens
tccctcttcaygcttaatgaa

SEQ ID NO: 15098 - DNA, 21 bp, Homo sapiens
cttcctttgaygtttgatttt

SEQ ID NO: 15099 - DNA, 21 bp, Homo sapiens
actttcgaatkacctactcaa

SEQ ID NO: 15100 - DNA, 21 bp, Homo sapiens
cacactttccyatttcctttt

SEQ ID NO: 15101 - DNA, 21 bp, Homo sapiens
atgcgttccaygagtagtctg

SEQ ID NO: 15102 - DNA, 21 bp, Homo sapiens
gtctttcaccyactgttctct

SEQ ID NO: 15103 - DNA, 21 bp, Homo sapiens
ttatagttttmatcttgcctt

SEQ ID NO: 15104 - DNA, 21 bp, Homo sapiens
ccagctcccayacagagtgat

SEQ ID NO: 15105 - DNA, 21 bp, Homo sapiens
gatctggtaartttcagttta

SEQ ID NO: 15106 - DNA, 21 bp, Homo sapiens
tgtcctcaatrtcacacttta

SEQ ID NO: 15107 - DNA, 21 bp, Homo sapiens
tgggaagcccrtggccgctgg

SEQ ID NO: 15108 - DNA, 21 bp, Homo sapiens
aaaataggtgycccgcaggca

SEQ ID NO: 15109 - DNA, 21 bp, Homo sapiens
ctagaacagcrgaactgcatt

SEQ ID NO: 15110 - DNA, 21 bp, Homo sapiens
attatttgggyataatgttcc

SEQ ID NO: 15111 - DNA, 21 bp, Homo sapiens
gttattcttgrattgtctagc

SEQ ID NO: 15112 - DNA, 21 bp, Homo sapiens
attgttggtcktaccttatgc

SEQ ID NO: 15113 - DNA, 21 bp, Homo sapiens
gtgcaaagtayctacttacgg

SEQ ID NO: 15114 - DNA, 21 bp, Homo sapiens
ataggtggaamccccacttgt

SEQ ID NO: 15115 - DNA, 21 bp, Homo sapiens
tggaaaccccmcttgttttta

SEQ ID NO: 15116 - DNA, 21 bp, Homo sapiens
ccctctcatgygttgattctt

SEQ ID NO: 15117 - DNA, 21 bp, Homo sapiens
aacctcccacrcttcacagga

SEQ ID NO: 15118 - DNA, 21 bp, Homo sapiens
aagataattayctaacatgtc

SEQ ID NO: 15119 - DNA, 21 bp, Homo sapiens
aattcatcaargcatctgtct

SEQ ID NO: 15120 - DNA, 21 bp, Homo sapiens
tcttttccacrtagtatctgt

SEQ ID NO: 15121 - DNA, 21 bp, Homo sapiens
ccaatatacartatcttctcc

SEQ ID NO: 15122 - DNA, 21 bp, Homo sapiens
aaaaataaaaragagacttcc

SEQ ID NO: 15123 - DNA, 21 bp, Homo sapiens
cttagaaggcyctcaatcctg

SEQ ID NO: 15124 - DNA, 21 bp, Homo sapiens
caaatcaatcraggacaattt

SEQ ID NO: 15125 - DNA, 21 bp, Homo sapiens
tacatgaaacrgtacttatta

SEQ ID NO: 15126 - DNA, 21 bp, Homo sapiens
gaatagactayatgtgtgtat

SEQ ID NO: 15127 - DNA, 21 bp, Homo sapiens
tacaattgctmaagtgttgga

SEQ ID NO: 15128 - DNA, 21 bp, Homo sapiens
ttcatattagkgacaagaaga

SEQ ID NO: 15129 - DNA, 21 bp, Homo sapiens
atccatctgtyccctccttta

SEQ ID NO: 15130 - DNA, 21 bp, Homo sapiens
acccagtcatrtttgcgtttt

SEQ ID NO: 15131 - DNA, 21 bp, Homo sapiens
taataaaataygcaaccaata

SEQ ID NO: 15132 - DNA, 21 bp, Homo sapiens
gcaaaattatyccatgtgaac

SEQ ID NO: 15133 - DNA, 21 bp, Homo sapiens
ctaaagtccarttcctcagta

SEQ ID NO: 15134 - DNA, 21 bp, Homo sapiens
aaatttgactytcttaatgcc

SEQ ID NO: 15135 - DNA, 21 bp, Homo sapiens
caggagaaccrcatttctgag

SEQ ID NO: 15136 - DNA, 21 bp, Homo sapiens
taaacatatgmtaaactctgg

SEQ ID NO: 15137 - DNA, 21 bp, Homo sapiens
ccagaagggaracaatagtgg

SEQ ID NO: 15138 - DNA, 21 bp, Homo sapiens
ttttctaaatrtggtcattgc

SEQ ID NO: 15139 - DNA, 21 bp, Homo sapiens
tgtgtgatatmttcacccgtg

SEQ ID NO: 15140 - DNA, 21 bp, Homo sapiens
agaaatatacmcaggatgagg

SEQ ID NO: 15141 - DNA, 21 bp, Homo sapiens
aaactagatamctttttgcaa

SEQ ID NO: 15142 - DNA, 21 bp, Homo sapiens
aggaatagccrgttcacaaaa

SEQ ID NO: 15143 - DNA, 21 bp, Homo sapiens
gaatgatagtkaaccttcata

SEQ ID NO: 15144 - DNA, 21 bp, Homo sapiens
tttaaaaattytatcacaaac

SEQ ID NO: 15145 - DNA, 21 bp, Homo sapiens
cctggaatagyggcaaacaca

SEQ ID NO: 15146 - DNA, 21 bp, Homo sapiens
ggaaataaggrcagcatattt

SEQ ID NO: 15147 - DNA, 21 bp, Homo sapiens
accatttgtgktatacattca

SEQ ID NO: 15148 - DNA, 21 bp, Homo sapiens
ccttggctgayaacatggtgc

SEQ ID NO: 15149 - DNA, 21 bp, Homo sapiens
tatcagacctmctgtggaaaa

SEQ ID NO: 15150 - DNA, 21 bp, Homo sapiens
tggatgtttaytgttaaaatg

SEQ ID NO: 15151 - DNA, 21 bp, Homo sapiens
tgcagtgcttrccctatacaa

SEQ ID NO: 15152 - DNA, 21 bp, Homo sapiens
aatttgtttaytttaaaatta

SEQ ID NO: 15153 - DNA, 21 bp, Homo sapiens
tggcaagcccraagccctgct

SEQ ID NO: 15154 - DNA, 21 bp, Homo sapiens
tcttcctcagytgacttgttc

SEQ ID NO: 15155 - DNA, 21 bp, Homo sapiens
tttaaatgtcygtggggttgt

SEQ ID NO: 15156 - DNA, 21 bp, Homo sapiens
aaataccaagkgttggagaac

SEQ ID NO: 15157 - DNA, 21 bp, Homo sapiens
tgcgacatttmcccatgggaa

SEQ ID NO: 15158 - DNA, 21 bp, Homo sapiens
ggatggatggrgaggatgaag

SEQ ID NO: 15159 - DNA, 21 bp, Homo sapiens
aggattcaaakaatagaggtc

SEQ ID NO: 15160 - DNA, 21 bp, Homo sapiens
gccaaggttayacagcaagtg

SEQ ID NO: 15161 - DNA, 21 bp, Homo sapiens
cccctgaggcyggatattgtt

SEQ ID NO: 15162 - DNA, 21 bp, Homo sapiens
aggaaggataygatggataaa

SEQ ID NO: 15163 - DNA, 21 bp, Homo sapiens
accgtaaaaargagattaaag

SEQ ID NO: 15164 - DNA, 21 bp, Homo sapiens
gcttgtttttmtttgcagttt

SEQ ID NO: 15165 - DNA, 21 bp, Homo sapiens
ttaccctttcyccttaaaccc

SEQ ID NO: 15166 - DNA, 21 bp, Homo sapiens
tcatctgttcmcagtcactca

SEQ ID NO: 15167 - DNA, 21 bp, Homo sapiens
gtatctgattygatcctcaca

SEQ ID NO: 15168 - DNA, 21 bp, Homo sapiens
gagacaacacrtgtatggccc

SEQ ID NO: 15169 - DNA, 21 bp, Homo sapiens
ctatcaccctytgccacagat

SEQ ID NO: 15170 - DNA, 21 bp, Homo sapiens
agagtccagcrgtccctctta

SEQ ID NO: 15171 - DNA, 21 bp, Homo sapiens
gtgtgggctgyaggtgttgcc

SEQ ID NO: 15172 - DNA, 21 bp, Homo sapiens
tttagtttacrtcatccagtg

SEQ ID NO: 15173 - DNA, 21 bp, Homo sapiens
gaaaggagtcmtttctgtgtc

SEQ ID NO: 15174 - DNA, 21 bp, Homo sapiens
taagatgggtrctgagagcag

SEQ ID NO: 15175 - DNA, 21 bp, Homo sapiens
ctgcttcccaragggctgctg

SEQ ID NO: 15176 - DNA, 21 bp, Homo sapiens
gtgccacacayacgttaggcc

SEQ ID NO: 15177 - DNA, 21 bp, Homo sapiens
taattctcttycagcacgggc

SEQ ID NO: 15178 - DNA, 21 bp, Homo sapiens
taaagccccaygcatcctgcg

SEQ ID NO: 15179 - DNA, 21 bp, Homo sapiens
cattaggaagyaaggcattag

SEQ ID NO: 15180 - DNA, 21 bp, Homo sapiens
cagcagtgttyggcacccctg

SEQ ID NO: 15181 - DNA, 21 bp, Homo sapiens
gtgaaagaacyagcttttctg

SEQ ID NO: 15182 - DNA, 21 bp, Homo sapiens
acaggaatctkgtacaattta

SEQ ID NO: 15183 - DNA, 21 bp, Homo sapiens
tttacctctayatgaatatat

SEQ ID NO: 15184 - DNA, 21 bp, Homo sapiens
tgagtagatayggctcacggg

SEQ ID NO: 15185 - DNA, 21 bp, Homo sapiens
aaggaaagtayagagagggca

SEQ ID NO: 15186 - DNA, 21 bp, Homo sapiens
aagagtgtgtrtaaagggcct

SEQ ID NO: 15187 - DNA, 21 bp, Homo sapiens
agaaccccgcrcccagcgtcc

SEQ ID NO: 15188 - DNA, 21 bp, Homo sapiens
cagccacagtygtcctggctt

SEQ ID NO: 15189 - DNA, 21 bp, Homo sapiens
ccgtgacagtyatccaggggg

SEQ ID NO: 15190 - DNA, 21 bp, Homo sapiens
ccctgcttcargggctgggga

SEQ ID NO: 15191 - DNA, 21 bp, Homo sapiens
tgactcttgcmggtagtgcac

SEQ ID NO: 15192 - DNA, 21 bp, Homo sapiens
cttgcccagcygtagctactg

SEQ ID NO: 15193 - DNA, 21 bp, Homo sapiens
ttattcatggrctgcggagga

SEQ ID NO: 15194 - DNA, 21 bp, Homo sapiens
tgcactggaaygagaggatct

SEQ ID NO: 15195 - DNA, 21 bp, Homo sapiens
ccttaagaaarttgaaaaggt

SEQ ID NO: 15196 - DNA, 21 bp, Homo sapiens
ttcaataaagytgaaccccaa

SEQ ID NO: 15197 - DNA, 21 bp, Homo sapiens
aagtcactccrctcctggtcc

SEQ ID NO: 15198 - DNA, 21 bp, Homo sapiens
agaactcacayaccctcacat

SEQ ID NO: 15199 - DNA, 21 bp, Homo sapiens
gagatatgaayggtgttgatt

SEQ ID NO: 15200 - DNA, 21 bp, Homo sapiens
ggaagtttggkgaatatgttt

SEQ ID NO: 15201 - DNA, 21 bp, Homo sapiens
tcattagatayttaataggca

SEQ ID NO: 15202 - DNA, 21 bp, Homo sapiens
tttaataccaygtctttctct

SEQ ID NO: 15203 - DNA, 21 bp, Homo sapiens
actctcaattrtatcacccca

SEQ ID NO: 15204 - DNA, 21 bp, Homo sapiens
gcaaacctaaytatgacaaag

SEQ ID NO: 15205 - DNA, 21 bp, Homo sapiens
tcttctctttmttttccttgt

SEQ ID NO: 15206 - DNA, 21 bp, Homo sapiens
gtctctggtcyttcttagagg

SEQ ID NO: 15207 - DNA, 21 bp, Homo sapiens
gcatataagcyctgagaaaat

SEQ ID NO: 15208 - DNA, 21 bp, Homo sapiens
ccacttaccartctgtgattt

SEQ ID NO: 15209 - DNA, 21 bp, Homo sapiens
ccccggaaccrcctgggggac

SEQ ID NO: 15210 - DNA, 21 bp, Homo sapiens
ggacaacactraagttcaaat

SEQ ID NO: 15211 - DNA, 21 bp, Homo sapiens
atattctcttytagttttcat

SEQ ID NO: 15212 - DNA, 21 bp, Homo sapiens
tggtttctaamtggttaagct

SEQ ID NO: 15213 - DNA, 21 bp, Homo sapiens
catgtctttaytgaaaagcag

SEQ ID NO: 15214 - DNA, 21 bp, Homo sapiens
tccaaaggcaytagaaattta

SEQ ID NO: 15215 - DNA, 21 bp, Homo sapiens
tgaacacgtgrttgatctaaa

SEQ ID NO: 15216 - DNA, 21 bp, Homo sapiens
gtaagtttctycaaagttgaa

SEQ ID NO: 15217 - DNA, 21 bp, Homo sapiens
cagataatggkacacacagct

SEQ ID NO: 15218 - DNA, 21 bp, Homo sapiens
tgggtgtgctmttcttaggag

SEQ ID NO: 15219 - DNA, 21 bp, Homo sapiens
cattggtcagyattctgagct

SEQ ID NO: 15220 - DNA, 21 bp, Homo sapiens
aggagaaccargaggctttca

SEQ ID NO: 15221 - DNA, 21 bp, Homo sapiens
cctccatcacragccgagcag

SEQ ID NO: 15222 - DNA, 21 bp, Homo sapiens
taagtttccartttttgctca

SEQ ID NO: 15223 - DNA, 21 bp, Homo sapiens
acatctttatrtttccctgat

SEQ ID NO: 15224 - DNA, 21 bp, Homo sapiens
ccttaacctcrgagcttctac

SEQ ID NO: 15225 - DNA, 21 bp, Homo sapiens
agaaaagaaaygtttgacacc

SEQ ID NO: 15226 - DNA, 21 bp, Homo sapiens
ggaagtgttayagaattctca

SEQ ID NO: 15227 - DNA, 21 bp, Homo sapiens
gatgaaaaaamaattcctggg

SEQ ID NO: 15228 - DNA, 21 bp, Homo sapiens
ctttccttggytaacttcttc

SEQ ID NO: 15229 - DNA, 21 bp, Homo sapiens
cattttattgycactctttgg

SEQ ID NO: 15230 - DNA, 21 bp, Homo sapiens
tactgctcacrgcccttgagc

SEQ ID NO: 15231 - DNA, 21 bp, Homo sapiens
tggacataccragaggaaatt

SEQ ID NO: 15232 - DNA, 21 bp, Homo sapiens
tgggctcttaygcaacacgct

SEQ ID NO: 15233 - DNA, 21 bp, Homo sapiens
tcaattcactrctaggatggc

SEQ ID NO: 15234 - DNA, 21 bp, Homo sapiens
tgaagccagayttcctagatc

SEQ ID NO: 15235 - DNA, 21 bp, Homo sapiens
cctactttacratgttttaga

SEQ ID NO: 15236 - DNA, 21 bp, Homo sapiens
tctttgcaacytgataagaca

SEQ ID NO: 15237 - DNA, 21 bp, Homo sapiens
cattaattacmcattcttaag

SEQ ID NO: 15238 - DNA, 21 bp, Homo sapiens
ttttgttgttkttttggtttt

SEQ ID NO: 15239 - DNA, 21 bp, Homo sapiens
taaaggccccrgagctgggac

SEQ ID NO: 15240 - DNA, 21 bp, Homo sapiens
aaatgtggaargaagcagagt

SEQ ID NO: 15241 - DNA, 21 bp, Homo sapiens
ttggagctgcrgcttggctag

SEQ ID NO: 15242 - DNA, 21 bp, Homo sapiens
tgaattctaaytgcccttgga

SEQ ID NO: 15243 - DNA, 21 bp, Homo sapiens
aattgtacatkttttctcctt

SEQ ID NO: 15244 - DNA, 21 bp, Homo sapiens
ttactgaaagrtttgacaaaa

SEQ ID NO: 15245 - DNA, 21 bp, Homo sapiens
ccagatatttyactaatataa

SEQ ID NO: 15246 - DNA, 21 bp, Homo sapiens
ggtgcctcttyatctataaac

SEQ ID NO: 15247 - DNA, 21 bp, Homo sapiens
aaactttaagytttgtcctgt

SEQ ID NO: 15248 - DNA, 21 bp, Homo sapiens
ataatatgtcrgtcatatagt

SEQ ID NO: 15249 - DNA, 21 bp, Homo sapiens
ttccctcattrtctctgcttc

SEQ ID NO: 15250 - DNA, 21 bp, Homo sapiens
gatagcagagrtaagatgaga

SEQ ID NO: 15251 - DNA, 21 bp, Homo sapiens
tctagcgagayaaatggaaaa

SEQ ID NO: 15252 - DNA, 21 bp, Homo sapiens
aattatttttyctccagtggg

SEQ ID NO: 15253 - DNA, 21 bp, Homo sapiens
actctggatgygtacttggac

SEQ ID NO: 15254 - DNA, 21 bp, Homo sapiens
gtctctttgtmattcacagga

SEQ ID NO: 15255 - DNA, 21 bp, Homo sapiens
cagtgcatgtrtaaggacatt

SEQ ID NO: 15256 - DNA, 21 bp, Homo sapiens
agatgacaacrtatttgaagc

SEQ ID NO: 15257 - DNA, 21 bp, Homo sapiens
tccacaaatgkcttagttcaa

SEQ ID NO: 15258 - DNA, 21 bp, Homo sapiens
gatggcaaatrttgtttgagt

SEQ ID NO: 15259 - DNA, 21 bp, Homo sapiens
gtgcttcattktttctcatca

SEQ ID NO: 15260 - DNA, 21 bp, Homo sapiens
tttttgtgctyacatgatatg

SEQ ID NO: 15261 - DNA, 21 bp, Homo sapiens
caagcccaackctgtcacttc

SEQ ID NO: 15262 - DNA, 21 bp, Homo sapiens
ttttttcatayttttaagggt

SEQ ID NO: 15263 - DNA, 21 bp, Homo sapiens
aaaccaaaatmaaatagctga

SEQ ID NO: 15264 - DNA, 21 bp, Homo sapiens
ggaatgcagarcctagactta

SEQ ID NO: 15265 - DNA, 21 bp, Homo sapiens
taagtaaaaakattaatcttc

SEQ ID NO: 15266 - DNA, 21 bp, Homo sapiens
cggaatttcaragaaaaagct

SEQ ID NO: 15267 - DNA, 21 bp, Homo sapiens
tggtctaacaytcaatgagtt

SEQ ID NO: 15268 - DNA, 21 bp, Homo sapiens
ttaggtttctktgttcaggtt

SEQ ID NO: 15269 - DNA, 21 bp, Homo sapiens
agcaatgcacygtaatgtttt

SEQ ID NO: 15270 - DNA, 21 bp, Homo sapiens
catcttggccyacacagcttt

SEQ ID NO: 15271 - DNA, 21 bp, Homo sapiens
tctctgcactrtggcgtctgc

SEQ ID NO: 15272 - DNA, 21 bp, Homo sapiens
atttgcctaaktctttttggt

SEQ ID NO: 15273 - DNA, 21 bp, Homo sapiens
gattcaactcrgcagtctcat

SEQ ID NO: 15274 - DNA, 21 bp, Homo sapiens
gcttgatcatktggggatttc

SEQ ID NO: 15275 - DNA, 21 bp, Homo sapiens
ttcccctaacrtgaactatgg

SEQ ID NO: 15276 - DNA, 21 bp, Homo sapiens
tatagcttcayattattttta

SEQ ID NO: 15277 - DNA, 21 bp, Homo sapiens
gaaagccattycctgagaacc

SEQ ID NO: 15278 - DNA, 21 bp, Homo sapiens
aacaaatacgraactgagtat

SEQ ID NO: 15279 - DNA, 21 bp, Homo sapiens
tactcctcagkggagaggtgg

SEQ ID NO: 15280 - DNA, 21 bp, Homo sapiens
tgagagtcttycttcatctgc

SEQ ID NO: 15281 - DNA, 21 bp, Homo sapiens
tgtaagtagcmgtaaccctaa

SEQ ID NO: 15282 - DNA, 21 bp, Homo sapiens
ggccttatgcyattatgaaac

SEQ ID NO: 15283 - DNA, 21 bp, Homo sapiens
aagcttcatargaatggaatt

SEQ ID NO: 15284 - DNA, 21 bp, Homo sapiens
gtgattacctragacattaga

SEQ ID NO: 15285 - DNA, 21 bp, Homo sapiens
atgcaacagtktaacacaaac

SEQ ID NO: 15286 - DNA, 21 bp, Homo sapiens
tttagcatgcrttagtatact

SEQ ID NO: 15287 - DNA, 21 bp, Homo sapiens
ctacaaactcrcctagttcat

SEQ ID NO: 15288 - DNA, 21 bp, Homo sapiens
tgggattacaytgaatttata

SEQ ID NO: 15289 - DNA, 21 bp, Homo sapiens
aaactgaaacytagctgaaga

SEQ ID NO: 15290 - DNA, 21 bp, Homo sapiens
catcttggggrtggtttatac

SEQ ID NO: 15291 - DNA, 21 bp, Homo sapiens
ggtagaatgayggatcagcag

SEQ ID NO: 15292 - DNA, 21 bp, Homo sapiens
tactgtgtgayatcatatgtg

SEQ ID NO: 15293 - DNA, 21 bp, Homo sapiens
aaaaacattcrtttgaaacag

SEQ ID NO: 15294 - DNA, 21 bp, Homo sapiens
aatggatttcrtgagcaactc

SEQ ID NO: 15295 - DNA, 21 bp, Homo sapiens
gaatcaaagayatcgatccta

SEQ ID NO: 15296 - DNA, 21 bp, Homo sapiens
ctgaaataaaygtcttgggga

SEQ ID NO: 15297 - DNA, 21 bp, Homo sapiens
tcctgtgaccygtgagaccag

SEQ ID NO: 15298 - DNA, 21 bp, Homo sapiens
catgctccaaytttatagttc

SEQ ID NO: 15299 - DNA, 21 bp, Homo sapiens
gtcttagcatkttctaaacta

SEQ ID NO: 15300 - DNA, 21 bp, Homo sapiens
gaacatcctcrtaggtctgcc

SEQ ID NO: 15301 - DNA, 21 bp, Homo sapiens
taaggtaagayttgataactt

SEQ ID NO: 15302 - DNA, 21 bp, Homo sapiens
ttgaatgtttrtgccctgtga

SEQ ID NO: 15303 - DNA, 21 bp, Homo sapiens
ctgagtaaatmttaggtcatg

SEQ ID NO: 15304 - DNA, 21 bp, Homo sapiens
ccactcatccytgatctccac

SEQ ID NO: 15305 - DNA, 21 bp, Homo sapiens
agtaaggttgracctctggtg

SEQ ID NO: 15306 - DNA, 21 bp, Homo sapiens
gatatatggaraaagatatgt

SEQ ID NO: 15307 - DNA, 21 bp, Homo sapiens
ttatatgccayccttcctctc

SEQ ID NO: 15308 - DNA, 21 bp, Homo sapiens
cttgtacattyaggcatccat

SEQ ID NO: 15309 - DNA, 21 bp, Homo sapiens
ataccagctcragggaagtct

SEQ ID NO: 15310 - DNA, 21 bp, Homo sapiens
aggcgtagtcyttcatgccaa

SEQ ID NO: 15311 - DNA, 21 bp, Homo sapiens
cagaattatcyggtaagaatg

SEQ ID NO: 15312 - DNA, 21 bp, Homo sapiens
agtgcacaackcatctactcc

SEQ ID NO: 15313 - DNA, 21 bp, Homo sapiens
gggaaaaatarcggaagaact

SEQ ID NO: 15314 - DNA, 21 bp, Homo sapiens
attaaaaatayctcaagcaaa

SEQ ID NO: 15315 - DNA, 21 bp, Homo sapiens
aaagtagtgartgagcatatt

SEQ ID NO: 15316 - DNA, 21 bp, Homo sapiens
gagacacttaygtcaagatta

SEQ ID NO: 15317 - DNA, 21 bp, Homo sapiens
aggaaagttaygaaatcgaat

SEQ ID NO: 15318 - DNA, 21 bp, Homo sapiens
gagcattaggyaaagggagag

SEQ ID NO: 15319 - DNA, 21 bp, Homo sapiens
ctactctctcrtgtttagact

SEQ ID NO: 15320 - DNA, 21 bp, Homo sapiens
tgctcagatcrtccatttaat

SEQ ID NO: 15321 - DNA, 21 bp, Homo sapiens
tggcctttctytagtaccgga

SEQ ID NO: 15322 - DNA, 21 bp, Homo sapiens
aataattaaaycaggctgtta

SEQ ID NO: 15323 - DNA, 21 bp, Homo sapiens
aggaagtttgkgagaaaagta

SEQ ID NO: 15324 - DNA, 21 bp, Homo sapiens
ataatgatcaragtcagagga

SEQ ID NO: 15325 - DNA, 21 bp, Homo sapiens
aaataacaagrgcatacatac

SEQ ID NO: 15326 - DNA, 21 bp, Homo sapiens
atgcaaatatyctgcaagaga

SEQ ID NO: 15327 - DNA, 21 bp, Homo sapiens
tggatatacarcctctacttg

SEQ ID NO: 15328 - DNA, 21 bp, Homo sapiens
cctgtgaacaytgtgagatat

SEQ ID NO: 15329 - DNA, 21 bp, Homo sapiens
atgcttgttayatgatacagt

SEQ ID NO: 15330 - DNA, 21 bp, Homo sapiens
agggaggtggrctagatgatt

SEQ ID NO: 15331 - DNA, 21 bp, Homo sapiens
catcttactgytgcttcaaag

SEQ ID NO: 15332 - DNA, 21 bp, Homo sapiens
aaaattgttcycaaagacctc

SEQ ID NO: 15333 - DNA, 21 bp, Homo sapiens
caatgttggargaatgataca

SEQ ID NO: 15334 - DNA, 21 bp, Homo sapiens
gcatatcttaytattttgtga

SEQ ID NO: 15335 - DNA, 21 bp, Homo sapiens
tgagaccaatyataaagtgac

SEQ ID NO: 15336 - DNA, 21 bp, Homo sapiens
caaccaagttragtgttcaaa

SEQ ID NO: 15337 - DNA, 21 bp, Homo sapiens
caatgagcgaratgccataat

SEQ ID NO: 15338 - DNA, 21 bp, Homo sapiens
catttctgaamctttgttggg

SEQ ID NO: 15339 - DNA, 21 bp, Homo sapiens
ttactggaatmatgggtatga

SEQ ID NO: 15340 - DNA, 21 bp, Homo sapiens
aaatgttgacmgatggcactg

SEQ ID NO: 15341 - DNA, 21 bp, Homo sapiens
taccttctacytttcagttgc

SEQ ID NO: 15342 - DNA, 21 bp, Homo sapiens
gcaatatgatrtcatttcctt

SEQ ID NO: 15343 - DNA, 21 bp, Homo sapiens
gctcttgccaygttcaaccaa

SEQ ID NO: 15344 - DNA, 21 bp, Homo sapiens
aaccatcaatrgaatgggacc

SEQ ID NO: 15345 - DNA, 21 bp, Homo sapiens
cagtacttttygtctttttcc

SEQ ID NO: 15346 - DNA, 21 bp, Homo sapiens
ttaccaaaacrtataactagt

SEQ ID NO: 15347 - DNA, 21 bp, Homo sapiens
tatggctctcmcataagaagg

SEQ ID NO: 15348 - DNA, 21 bp, Homo sapiens
ccatcaaaaayagaaataaaa

SEQ ID NO: 15349 - DNA, 21 bp, Homo sapiens
agacaagtcgrtcatgtcatg

SEQ ID NO: 15350 - DNA, 21 bp, Homo sapiens
ggagccggttrgcagactctc

SEQ ID NO: 15351 - DNA, 21 bp, Homo sapiens
gaaatgagtcytggcacttgg

SEQ ID NO: 15352 - DNA, 21 bp, Homo sapiens
gcaagagcaartaggtaaaaa

SEQ ID NO: 15353 - DNA, 21 bp, Homo sapiens
ctaatgttaartctgacaatc

SEQ ID NO: 15354 - DNA, 21 bp, Homo sapiens
catttagtagytgtctcggtt

SEQ ID NO: 15355 - DNA, 21 bp, Homo sapiens
aatattcaaamaaacagaact

SEQ ID NO: 15356 - DNA, 21 bp, Homo sapiens
atctgtaggcyccagatccta

SEQ ID NO: 15357 - DNA, 21 bp, Homo sapiens
ggcaaaaggaractaaatatt

SEQ ID NO: 15358 - DNA, 21 bp, Homo sapiens
gagcatgtcartcataaacat

SEQ ID NO: 15359 - DNA, 21 bp, Homo sapiens
aggctctaacytgacaccttt

SEQ ID NO: 15360 - DNA, 21 bp, Homo sapiens
cactaaagtgycttgcatttc

SEQ ID NO: 15361 - DNA, 21 bp, Homo sapiens
tttcctatttyaaattaaatt

SEQ ID NO: 15362 - DNA, 21 bp, Homo sapiens
tgacgtcaccrggtacatcat

SEQ ID NO: 15363 - DNA, 21 bp, Homo sapiens
aacattgcctrgtaggaaatg

SEQ ID NO: 15364 - DNA, 21 bp, Homo sapiens
gtactgcaggrtgagttatat

SEQ ID NO: 15365 - DNA, 21 bp, Homo sapiens
tgttttactcygtccctctct

SEQ ID NO: 15366 - DNA, 21 bp, Homo sapiens
atctccaaccyttatttctct

SEQ ID NO: 15367 - DNA, 21 bp, Homo sapiens
ccttgggatgygcatgcatat

SEQ ID NO: 15368 - DNA, 21 bp, Homo sapiens
gtttagaaacmtttttcccaa

SEQ ID NO: 15369 - DNA, 21 bp, Homo sapiens
gaatatctacytaaattatta

SEQ ID NO: 15370 - DNA, 21 bp, Homo sapiens
atattatgccmgtagacacaa

SEQ ID NO: 15371 - DNA, 21 bp, Homo sapiens
caacttttcaycaaatgtttc

SEQ ID NO: 15372 - DNA, 21 bp, Homo sapiens
gaatacattcrtatatataaa

SEQ ID NO: 15373 - DNA, 21 bp, Homo sapiens
ctccacccccmcaccaccccc

SEQ ID NO: 15374 - DNA, 21 bp, Homo sapiens
caaagcaagcrgggggccttt

SEQ ID NO: 15375 - DNA, 21 bp, Homo sapiens
agagctagtarcaaaacattt

SEQ ID NO: 15376 - DNA, 21 bp, Homo sapiens
gttgatttccraattatcatc

SEQ ID NO: 15377 - DNA, 21 bp, Homo sapiens
aagatagggtkccagccagtc

SEQ ID NO: 15378 - DNA, 21 bp, Homo sapiens
gactagcttartatctttaaa

SEQ ID NO: 15379 - DNA, 21 bp, Homo sapiens
ggcaagactckaaagtcattg

SEQ ID NO: 15380 - DNA, 21 bp, Homo sapiens
tcacagatacyatttatttcc

SEQ ID NO: 15381 - DNA, 21 bp, Homo sapiens
tgggtagaccrcttaaagaaa

SEQ ID NO: 15382 - DNA, 21 bp, Homo sapiens
ttatgtcttaytcagttttgc

SEQ ID NO: 15383 - DNA, 21 bp, Homo sapiens
tatagagaacrcattgggcat

SEQ ID NO: 15384 - DNA, 21 bp, Homo sapiens
tatcagtaaaytcttctttat

SEQ ID NO: 15385 - DNA, 21 bp, Homo sapiens
ttacactgtcyctttccatgc

SEQ ID NO: 15386 - DNA, 21 bp, Homo sapiens
tccagtccttygaggctctga

SEQ ID NO: 15387 - DNA, 21 bp, Homo sapiens
tcctttgctcygtgcttcttt

SEQ ID NO: 15388 - DNA, 21 bp, Homo sapiens
aatcctagaartaattcaaaa

SEQ ID NO: 15389 - DNA, 21 bp, Homo sapiens
tccccatacartaatacacat

SEQ ID NO: 15390 - DNA, 21 bp, Homo sapiens
catcactcccmatgaggtatc

SEQ ID NO: 15391 - DNA, 21 bp, Homo sapiens
ttaagaaactkccatttgtga

SEQ ID NO: 15392 - DNA, 21 bp, Homo sapiens
acataagcatycttgctaatt

SEQ ID NO: 15393 - DNA, 21 bp, Homo sapiens
accaaaagaayggaagaggaa

SEQ ID NO: 15394 - DNA, 21 bp, Homo sapiens
ggacttgcaayatcacaccag

SEQ ID NO: 15395 - DNA, 21 bp, Homo sapiens
gaccttcccakgagttcataa

SEQ ID NO: 15396 - DNA, 21 bp, Homo sapiens
tctcctgggamcttcccttac

SEQ ID NO: 15397 - DNA, 21 bp, Homo sapiens
aatggaaggcrttagtcctcc

SEQ ID NO: 15398 - DNA, 21 bp, Homo sapiens
acatggaaaamtatggttata

SEQ ID NO: 15399 - DNA, 21 bp, Homo sapiens
gacaaatagcrtgttaagaag

SEQ ID NO: 15400 - DNA, 21 bp, Homo sapiens
tgattttccakttcttccaga

SEQ ID NO: 15401 - DNA, 21 bp, Homo sapiens
agagctgtgcrtaatgaggac

SEQ ID NO: 15402 - DNA, 21 bp, Homo sapiens
gtaaggaatamattctggatt

SEQ ID NO: 15403 - DNA, 21 bp, Homo sapiens
cttttgggcartaattaaggc

SEQ ID NO: 15404 - DNA, 21 bp, Homo sapiens
ccttttggacyatttgggtgg

SEQ ID NO: 15405 - DNA, 21 bp, Homo sapiens
gtacatagctrtaaatgaaac

SEQ ID NO: 15406 - DNA, 21 bp, Homo sapiens
gacttgagaamctgttgttgc

SEQ ID NO: 15407 - DNA, 21 bp, Homo sapiens
actttcccccyaagtgttaac

SEQ ID NO: 15408 - DNA, 21 bp, Homo sapiens
gtgaaagtcaygttctgaggc

SEQ ID NO: 15409 - DNA, 21 bp, Homo sapiens
ctttagggcarctatttaata

SEQ ID NO: 15410 - DNA, 21 bp, Homo sapiens
ctttttaccargacccatatg

SEQ ID NO: 15411 - DNA, 21 bp, Homo sapiens
aatgaaataayttctccaaag

SEQ ID NO: 15412 - DNA, 21 bp, Homo sapiens
aaaatgacacmaccatacccc

SEQ ID NO: 15413 - DNA, 21 bp, Homo sapiens
aaacaatgaaytaaaggtatt

SEQ ID NO: 15414 - DNA, 21 bp, Homo sapiens
attcattcttyaattgagcaa

SEQ ID NO: 15415 - DNA, 21 bp, Homo sapiens
aaatagctctrtaacatagag

SEQ ID NO: 15416 - DNA, 21 bp, Homo sapiens
gagtgaagtcrgtcctgcaat

SEQ ID NO: 15417 - DNA, 21 bp, Homo sapiens
ttttctactckttcttaagaa

SEQ ID NO: 15418 - DNA, 21 bp, Homo sapiens
ttaaatgaaargagtttaatg

SEQ ID NO: 15419 - DNA, 21 bp, Homo sapiens
tagagataacmactgaagaac

SEQ ID NO: 15420 - DNA, 21 bp, Homo sapiens
ctgctatcagyctaattgtcg

SEQ ID NO: 15421 - DNA, 21 bp, Homo sapiens
tactataattrcagacagaat

SEQ ID NO: 15422 - DNA, 21 bp, Homo sapiens
gacccactttkttcacttctc

SEQ ID NO: 15423 - DNA, 21 bp, Homo sapiens
gggtccagacmcttcattttt

SEQ ID NO: 15424 - DNA, 21 bp, Homo sapiens
aacaacctttrtactttgagg

SEQ ID NO: 15425 - DNA, 21 bp, Homo sapiens
ttgaagttttrtattatgagc

SEQ ID NO: 15426 - DNA, 21 bp, Homo sapiens
actggaaccartctatcctct

SEQ ID NO: 15427 - DNA, 21 bp, Homo sapiens
agggaaaaggkttttatcaga

SEQ ID NO: 15428 - DNA, 21 bp, Homo sapiens
agcaaagggamgaaggtatga

SEQ ID NO: 15429 - DNA, 21 bp, Homo sapiens
caattgagggmcttggagaaa

SEQ ID NO: 15430 - DNA, 21 bp, Homo sapiens
gcaagcagtcratatggcttg

SEQ ID NO: 15431 - DNA, 21 bp, Homo sapiens
cctggaatccragttaccaga

SEQ ID NO: 15432 - DNA, 21 bp, Homo sapiens
agaactttggraaagtctgaa

SEQ ID NO: 15433 - DNA, 21 bp, Homo sapiens
atctcccatcrttattgttgt

SEQ ID NO: 15434 - DNA, 21 bp, Homo sapiens
aaaggagtacrgactaagaaa

SEQ ID NO: 15435 - DNA, 21 bp, Homo sapiens
tttttgaattyagttttaatt

SEQ ID NO: 15436 - DNA, 21 bp, Homo sapiens
taattttctcmactcataata

SEQ ID NO: 15437 - DNA, 21 bp, Homo sapiens
catctacattmccatcaacag

SEQ ID NO: 15438 - DNA, 21 bp, Homo sapiens
tcatgactgtmtattggtttg

SEQ ID NO: 15439 - DNA, 21 bp, Homo sapiens
tttgggagtgraggtcaaaat

SEQ ID NO: 15440 - DNA, 21 bp, Homo sapiens
aacacttcttycattcacttg

SEQ ID NO: 15441 - DNA, 21 bp, Homo sapiens
ccagggcattmtcatgctctc

SEQ ID NO: 15442 - DNA, 21 bp, Homo sapiens
ttacagtgccrttggccatga

SEQ ID NO: 15443 - DNA, 21 bp, Homo sapiens
gatttcacacytatgatttta

SEQ ID NO: 15444 - DNA, 21 bp, Homo sapiens
gcaaataaaarccaattaaga

SEQ ID NO: 15445 - DNA, 21 bp, Homo sapiens
gagcaagtgcrtaagcacaaa

SEQ ID NO: 15446 - DNA, 21 bp, Homo sapiens
accaagtgagrtgggctctag

SEQ ID NO: 15447 - DNA, 21 bp, Homo sapiens
gtgccatcatktgagctgaaa

SEQ ID NO: 15448 - DNA, 21 bp, Homo sapiens
atggggaactragtagaacat

SEQ ID NO: 15449 - DNA, 21 bp, Homo sapiens
tctctgccacrtgccctcaaa

SEQ ID NO: 15450 - DNA, 21 bp, Homo sapiens
tcttcctaccygccaaatggc

SEQ ID NO: 15451 - DNA, 21 bp, Homo sapiens
tataagatacrtttagataaa

SEQ ID NO: 15452 - DNA, 21 bp, Homo sapiens
tcaaagtcagrattaggataa

SEQ ID NO: 15453 - DNA, 21 bp, Homo sapiens
tcaggccttaraccttgtgat

SEQ ID NO: 15454 - DNA, 21 bp, Homo sapiens
gagaagataayatgtaagttg

SEQ ID NO: 15455 - DNA, 21 bp, Homo sapiens
ttcctccaagrccagttgaga

SEQ ID NO: 15456 - DNA, 21 bp, Homo sapiens
tagtttttgcygcttcatctt

SEQ ID NO: 15457 - DNA, 21 bp, Homo sapiens
gctctatctgrgtgactaatt

SEQ ID NO: 15458 - DNA, 21 bp, Homo sapiens
ctttctccatmtggctcctat

SEQ ID NO: 15459 - DNA, 21 bp, Homo sapiens
ttttatttttyttctcagtgt

SEQ ID NO: 15460 - DNA, 21 bp, Homo sapiens
caatagcagaytgaagtgtta

SEQ ID NO: 15461 - DNA, 21 bp, Homo sapiens
attcagttgcyaaatggaaat

SEQ ID NO: 15462 - DNA, 21 bp, Homo sapiens
accctcgaacrtccttgtgac

SEQ ID NO: 15463 - DNA, 21 bp, Homo sapiens
tcacgagatgyaatgaaatct

SEQ ID NO: 15464 - DNA, 21 bp, Homo sapiens
cttctagaatrtagatcctgg

SEQ ID NO: 15465 - DNA, 21 bp, Homo sapiens
ctaatcctaayagggttcctg

SEQ ID NO: 15466 - DNA, 21 bp, Homo sapiens
cgcaactgggkattataggag

SEQ ID NO: 15467 - DNA, 21 bp, Homo sapiens
tcttgcttacyccaacaaaga

SEQ ID NO: 15468 - DNA, 21 bp, Homo sapiens
tagagttaccygtcatggttt

SEQ ID NO: 15469 - DNA, 21 bp, Homo sapiens
ttgagagcagrcatctgtcta

SEQ ID NO: 15470 - DNA, 21 bp, Homo sapiens
gggaggacgayttatatctaa

SEQ ID NO: 15471 - DNA, 21 bp, Homo sapiens
acaaataaaamtctctgagta

SEQ ID NO: 15472 - DNA, 21 bp, Homo sapiens
agtgaagggtkatgagagaag

SEQ ID NO: 15473 - DNA, 21 bp, Homo sapiens
gtctcccttcrtaggattcat

SEQ ID NO: 15474 - DNA, 21 bp, Homo sapiens
atttttttcartttttcttaa

SEQ ID NO: 15475 - DNA, 21 bp, Homo sapiens
cttaatggctkagccagaatt

SEQ ID NO: 15476 - DNA, 21 bp, Homo sapiens
acaaaaaccaytgaaataatc

SEQ ID NO: 15477 - DNA, 21 bp, Homo sapiens
ctggttttatktgatacatag

SEQ ID NO: 15478 - DNA, 21 bp, Homo sapiens
gcagcaataaygtagccagaa

SEQ ID NO: 15479 - DNA, 21 bp, Homo sapiens
tgtcatattaygcttttatgg

SEQ ID NO: 15480 - DNA, 21 bp, Homo sapiens
ggttagttagytggtgcaggg

SEQ ID NO: 15481 - DNA, 21 bp, Homo sapiens
ctgatgatgcragtgatctcc

SEQ ID NO: 15482 - DNA, 21 bp, Homo sapiens
agcgaaatgaktcaagcctgt

SEQ ID NO: 15483 - DNA, 21 bp, Homo sapiens
cctgctttcartccctttgtg

SEQ ID NO: 15484 - DNA, 21 bp, Homo sapiens
aaaacgaggtmttcctgagta

SEQ ID NO: 15485 - DNA, 21 bp, Homo sapiens
aggcattcagrcctagatgat

SEQ ID NO: 15486 - DNA, 21 bp, Homo sapiens
tatcccctcgmagtttgccac

SEQ ID NO: 15487 - DNA, 21 bp, Homo sapiens
tgtgcaggacrtgacttggcc

SEQ ID NO: 15488 - DNA, 21 bp, Homo sapiens
actttccaccrtgacacagag

SEQ ID NO: 15489 - DNA, 21 bp, Homo sapiens
cttctttcctrtatatgtgta

SEQ ID NO: 15490 - DNA, 21 bp, Homo sapiens
gggccaagccrtagactgctc

SEQ ID NO: 15491 - DNA, 21 bp, Homo sapiens
acagatgcccrttgggtgcaa

SEQ ID NO: 15492 - DNA, 21 bp, Homo sapiens
ttcaggcaagkgttttaaaat

SEQ ID NO: 15493 - DNA, 21 bp, Homo sapiens
atcatccccaragttttcttg

SEQ ID NO: 15494 - DNA, 21 bp, Homo sapiens
cggagatgtayagaggtagag

SEQ ID NO: 15495 - DNA, 21 bp, Homo sapiens
ccttgtgggcraattgtgctt

SEQ ID NO: 15496 - DNA, 21 bp, Homo sapiens
agtctgaagtyggattcgtta

SEQ ID NO: 15497 - DNA, 21 bp, Homo sapiens
tcttgtgctcyttgttttttc

SEQ ID NO: 15498 - DNA, 21 bp, Homo sapiens
ttagtggagtrcacccttcag

SEQ ID NO: 15499 - DNA, 21 bp, Homo sapiens
aggaaattccrgatcttccca

SEQ ID NO: 15500 - DNA, 21 bp, Homo sapiens
ctccatggtaytgggatgaac

SEQ ID NO: 15501 - DNA, 21 bp, Homo sapiens
ttgcatagccrtaatataaag

SEQ ID NO: 15502 - DNA, 21 bp, Homo sapiens
ttgtcttcaamtctaataatc

SEQ ID NO: 15503 - DNA, 21 bp, Homo sapiens
atgatgtgtgyggattccagt

SEQ ID NO: 15504 - DNA, 21 bp, Homo sapiens
gttttatacaytgagaccaat

SEQ ID NO: 15505 - DNA, 21 bp, Homo sapiens
aggacaaaatyggatttacaa

SEQ ID NO: 15506 - DNA, 21 bp, Homo sapiens
ttgaaaagaayggtcagaggc

SEQ ID NO: 15507 - DNA, 21 bp, Homo sapiens
aggacgacacygaagccacaa

SEQ ID NO: 15508 - DNA, 21 bp, Homo sapiens
attcctaatayttatttctgt

SEQ ID NO: 15509 - DNA, 21 bp, Homo sapiens
atttgggtcartattttcctc

SEQ ID NO: 15510 - DNA, 21 bp, Homo sapiens
gtacagagtargaaaggtcca

SEQ ID NO: 15511 - DNA, 21 bp, Homo sapiens
ggcaacacttygatgttactc

SEQ ID NO: 15512 - DNA, 21 bp, Homo sapiens
aatacagtctkgatcttctga

SEQ ID NO: 15513 - DNA, 21 bp, Homo sapiens
ataacaacaayagtaatgaca

SEQ ID NO: 15514 - DNA, 21 bp, Homo sapiens
agtagcttacmatctagtatc

SEQ ID NO: 15515 - DNA, 21 bp, Homo sapiens
ctgtgttatartctgataaga

SEQ ID NO: 15516 - DNA, 21 bp, Homo sapiens
ttctgattacyacagcaatgg

SEQ ID NO: 15517 - DNA, 21 bp, Homo sapiens
ctatgacgtgyttctgaagtt

SEQ ID NO: 15518 - DNA, 21 bp, Homo sapiens
ctattacttcygtcttattct

SEQ ID NO: 15519 - DNA, 21 bp, Homo sapiens
atgtaggttayaaaagaaata

SEQ ID NO: 15520 - DNA, 21 bp, Homo sapiens
aatcaagaggytacgataaat

SEQ ID NO: 15521 - DNA, 21 bp, Homo sapiens
atttgtcttgytttcatctaa

SEQ ID NO: 15522 - DNA, 21 bp, Homo sapiens
ttgcctatacrtttactttcg

SEQ ID NO: 15523 - DNA, 21 bp, Homo sapiens
aattgctgtgkttaatatatt

SEQ ID NO: 15524 - DNA, 21 bp, Homo sapiens
acagcacttayagagaattag

SEQ ID NO: 15525 - DNA, 21 bp, Homo sapiens
gcaattttttmagcacccaat

SEQ ID NO: 15526 - DNA, 21 bp, Homo sapiens
gcagatgatgycaggttttat

SEQ ID NO: 15527 - DNA, 21 bp, Homo sapiens
tgagatggaartggaaactta

SEQ ID NO: 15528 - DNA, 21 bp, Homo sapiens
gattccaaaakaccttcccat

SEQ ID NO: 15529 - DNA, 21 bp, Homo sapiens
ttctagatgcyagaagtaaaa

SEQ ID NO: 15530 - DNA, 21 bp, Homo sapiens
tccaaggcacrtgacatttca

SEQ ID NO: 15531 - DNA, 21 bp, Homo sapiens
tttaaaaagcrtagaagttgt

SEQ ID NO: 15532 - DNA, 21 bp, Homo sapiens
ctcatttaacygttagtatat

SEQ ID NO: 15533 - DNA, 21 bp, Homo sapiens
aagtgaaagayaaatgtaaga

SEQ ID NO: 15534 - DNA, 21 bp, Homo sapiens
atagaaattcyagtattttct

SEQ ID NO: 15535 - DNA, 21 bp, Homo sapiens
ttttagagccytttctaactc

SEQ ID NO: 15536 - DNA, 21 bp, Homo sapiens
gcatgcctagyggttacatag

SEQ ID NO: 15537 - DNA, 21 bp, Homo sapiens
gggaaagaaartatatttagc

SEQ ID NO: 15538 - DNA, 21 bp, Homo sapiens
tagcaaaaatmatgacaacag

SEQ ID NO: 15539 - DNA, 21 bp, Homo sapiens
ttaatcaaagrtttctaattt

SEQ ID NO: 15540 - DNA, 21 bp, Homo sapiens
tctaagtgagytttcctcatt

SEQ ID NO: 15541 - DNA, 21 bp, Homo sapiens
ccctgggagarcatttgcttt

SEQ ID NO: 15542 - DNA, 21 bp, Homo sapiens
attggacctcytcgttactgt

SEQ ID NO: 15543 - DNA, 21 bp, Homo sapiens
tctatcctccrtgacaatagc

SEQ ID NO: 15544 - DNA, 21 bp, Homo sapiens
tagattaggcyattgaaaact

SEQ ID NO: 15545 - DNA, 21 bp, Homo sapiens
aaaacataagktatccatatc

SEQ ID NO: 15546 - DNA, 21 bp, Homo sapiens
actagctgaamcgaagcccag

SEQ ID NO: 15547 - DNA, 21 bp, Homo sapiens
tttatgaagcytagaagaatg

SEQ ID NO: 15548 - DNA, 21 bp, Homo sapiens
tgaaactgttytgttgttttt

SEQ ID NO: 15549 - DNA, 21 bp, Homo sapiens
aaatacctcarcgtttatcat

SEQ ID NO: 15550 - DNA, 21 bp, Homo sapiens
aagaggcaaayctgtttccat

SEQ ID NO: 15551 - DNA, 21 bp, Homo sapiens
ccaagtgtccrtcatgtgtgt

SEQ ID NO: 15552 - DNA, 21 bp, Homo sapiens
gtagttgaagrggtcattaaa

SEQ ID NO: 15553 - DNA, 21 bp, Homo sapiens
tacagcccagytttcttgtgc

SEQ ID NO: 15554 - DNA, 21 bp, Homo sapiens
accagaggctyatgaaacttc

SEQ ID NO: 15555 - DNA, 21 bp, Homo sapiens
tgaccatctayttcccaacca

SEQ ID NO: 15556 - DNA, 21 bp, Homo sapiens
tgggaaccaarctgatcgaca

SEQ ID NO: 15557 - DNA, 21 bp, Homo sapiens
gagactagaarggacatgaaa

SEQ ID NO: 15558 - DNA, 21 bp, Homo sapiens
atttgtaatcygcaacttctg

SEQ ID NO: 15559 - DNA, 21 bp, Homo sapiens
tattctttctrtctactaccc

SEQ ID NO: 15560 - DNA, 21 bp, Homo sapiens
caagatatgtyatagggatca

SEQ ID NO: 15561 - DNA, 21 bp, Homo sapiens
gcaacttagcyattacttcct

SEQ ID NO: 15562 - DNA, 21 bp, Homo sapiens
ttccttatgcygcccattctg

SEQ ID NO: 15563 - DNA, 21 bp, Homo sapiens
aataaattaayggctcctcag

SEQ ID NO: 15564 - DNA, 21 bp, Homo sapiens
aataaatgtaygtactttgtc

SEQ ID NO: 15565 - DNA, 21 bp, Homo sapiens
agcaaaaatgkgttcctaata

SEQ ID NO: 15566 - DNA, 21 bp, Homo sapiens
actcaagagtraagtattaag

SEQ ID NO: 15567 - DNA, 21 bp, Homo sapiens
ctttttttgtrcaatctgttt

SEQ ID NO: 15568 - DNA, 21 bp, Homo sapiens
aggatttcttygtgagtcatc

SEQ ID NO: 15569 - DNA, 21 bp, Homo sapiens
tccttgccctktctgaattta

SEQ ID NO: 15570 - DNA, 21 bp, Homo sapiens
atgaagagcayaacctttgcc

SEQ ID NO: 15571 - DNA, 21 bp, Homo sapiens
ttgaagaatgrgctaatgttt

SEQ ID NO: 15572 - DNA, 21 bp, Homo sapiens
tacaaagagcrtaagatagga

SEQ ID NO: 15573 - DNA, 21 bp, Homo sapiens
taaatctaaayagagtcaatg

SEQ ID NO: 15574 - DNA, 21 bp, Homo sapiens
tcctattcctrtcaagacata

SEQ ID NO: 15575 - DNA, 21 bp, Homo sapiens
ataggcattgkatgatagcat

SEQ ID NO: 15576 - DNA, 21 bp, Homo sapiens
ctgcctctatktttcaactgc

SEQ ID NO: 15577 - DNA, 21 bp, Homo sapiens
ggtcttggctrtgtggcttac

SEQ ID NO: 15578 - DNA, 21 bp, Homo sapiens
taaaaccaaakagtgcaaaat

SEQ ID NO: 15579 - DNA, 21 bp, Homo sapiens
gataactgaayggagagtgga

SEQ ID NO: 15580 - DNA, 21 bp, Homo sapiens
agatgcttatmatttagaact

SEQ ID NO: 15581 - DNA, 21 bp, Homo sapiens
cagtgtggaartttctattta

SEQ ID NO: 15582 - DNA, 21 bp, Homo sapiens
cttcagacatkagtaagcaat

SEQ ID NO: 15583 - DNA, 21 bp, Homo sapiens
ttcaatctccrtgtttgtact

SEQ ID NO: 15584 - DNA, 21 bp, Homo sapiens
tctgcaagcaygttctcagaa

SEQ ID NO: 15585 - DNA, 21 bp, Homo sapiens
aaataaatcayaaccaataga

SEQ ID NO: 15586 - DNA, 21 bp, Homo sapiens
aagcaaacgcrtgtgacaaaa

SEQ ID NO: 15587 - DNA, 21 bp, Homo sapiens
caaaaaagaaygggataatgt

SEQ ID NO: 15588 - DNA, 21 bp, Homo sapiens
acttgtaagaytttgataatt

SEQ ID NO: 15589 - DNA, 21 bp, Homo sapiens
aatgcagctaytgagagagat

SEQ ID NO: 15590 - DNA, 21 bp, Homo sapiens
gtgatgaaatrctatgtacga

SEQ ID NO: 15591 - DNA, 21 bp, Homo sapiens
tgctttgtatycattgaaaac

SEQ ID NO: 15592 - DNA, 21 bp, Homo sapiens
gttgaatgcayagtacggctc

SEQ ID NO: 15593 - DNA, 21 bp, Homo sapiens
gattccagcarctattttaat

SEQ ID NO: 15594 - DNA, 21 bp, Homo sapiens
tcactgcaatytgtataatta

SEQ ID NO: 15595 - DNA, 21 bp, Homo sapiens
agctggaaaayttactttcta

SEQ ID NO: 15596 - DNA, 21 bp, Homo sapiens
catgatttcaytcctcgctag

SEQ ID NO: 15597 - DNA, 21 bp, Homo sapiens
cacagtaagaragttttgctt

SEQ ID NO: 15598 - DNA, 21 bp, Homo sapiens
ggttaatgatyctccctggtt

SEQ ID NO: 15599 - DNA, 21 bp, Homo sapiens
agataaacaayaggaggatca

SEQ ID NO: 15600 - DNA, 21 bp, Homo sapiens
gaactcaacartctttttgaa

SEQ ID NO: 15601 - DNA, 21 bp, Homo sapiens
agctgaggaamcatttctatt

SEQ ID NO: 15602 - DNA, 21 bp, Homo sapiens
tattgagaatrgtatccttca

SEQ ID NO: 15603 - DNA, 21 bp, Homo sapiens
tggggagaggygaattaaaag

SEQ ID NO: 15604 - DNA, 21 bp, Homo sapiens
ccccaacaacmtttaacttcc

SEQ ID NO: 15605 - DNA, 21 bp, Homo sapiens
caggtattcayttcaaaccat

SEQ ID NO: 15606 - DNA, 21 bp, Homo sapiens
tgcctgagtgyaagaagctat

SEQ ID NO: 15607 - DNA, 21 bp, Homo sapiens
tctttctcccrgatatctctt

SEQ ID NO: 15608 - DNA, 21 bp, Homo sapiens
caaactgaatragtctaatag

SEQ ID NO: 15609 - DNA, 21 bp, Homo sapiens
ccaaaatataytggtatatcc

SEQ ID NO: 15610 - DNA, 21 bp, Homo sapiens
catggtaaaayaaaagataaa

SEQ ID NO: 15611 - DNA, 21 bp, Homo sapiens
ctggcattatmtctgttttaa

SEQ ID NO: 15612 - DNA, 21 bp, Homo sapiens
ttccttttgtktgtctctatc

SEQ ID NO: 15613 - DNA, 21 bp, Homo sapiens
cacataaaggrgcttcatttc

SEQ ID NO: 15614 - DNA, 21 bp, Homo sapiens
ttgactgtcartgacacaaga

SEQ ID NO: 15615 - DNA, 21 bp, Homo sapiens
aataaaaatgygtaagtgttt

SEQ ID NO: 15616 - DNA, 21 bp, Homo sapiens
gtatctcaaamaacctgaaca

SEQ ID NO: 15617 - DNA, 21 bp, Homo sapiens
aaaaagctgtrgagacatttt

SEQ ID NO: 15618 - DNA, 21 bp, Homo sapiens
ttctttgaatyaccaccccta

SEQ ID NO: 15619 - DNA, 21 bp, Homo sapiens
acctcaagggrccacacattt

SEQ ID NO: 15620 - DNA, 21 bp, Homo sapiens
atacctgaaarctgcattagg

SEQ ID NO: 15621 - DNA, 21 bp, Homo sapiens
aaatacctgtygtaaaacaag

SEQ ID NO: 15622 - DNA, 21 bp, Homo sapiens
aataagaaagrcttcttgttg

SEQ ID NO: 15623 - DNA, 21 bp, Homo sapiens
agaggaggacrattgaatgcc

SEQ ID NO: 15624 - DNA, 21 bp, Homo sapiens
tatttttccartagcataggg

SEQ ID NO: 15625 - DNA, 21 bp, Homo sapiens
gtagacaagaytatttgtaca

SEQ ID NO: 15626 - DNA, 21 bp, Homo sapiens
aactttttacrcatactgggg

SEQ ID NO: 15627 - DNA, 21 bp, Homo sapiens
acattaaatartattgcaaag

SEQ ID NO: 15628 - DNA, 21 bp, Homo sapiens
ttcaatctcarttatggcctt

SEQ ID NO: 15629 - DNA, 21 bp, Homo sapiens
gaatatataamcaaggaggga

SEQ ID NO: 15630 - DNA, 21 bp, Homo sapiens
tcaatcatttkggcctcacta

SEQ ID NO: 15631 - DNA, 21 bp, Homo sapiens
attcaactcaktaatgaacta

SEQ ID NO: 15632 - DNA, 21 bp, Homo sapiens
tttgctgataytgtgtcttta

SEQ ID NO: 15633 - DNA, 21 bp, Homo sapiens
taagtatgaayatgcatttcc

SEQ ID NO: 15634 - DNA, 21 bp, Homo sapiens
aagatgaaggratgtgcattc

SEQ ID NO: 15635 - DNA, 21 bp, Homo sapiens
aagctaggaakgcaaccagaa

SEQ ID NO: 15636 - DNA, 21 bp, Homo sapiens
agcactgtacygaaccaaagg

SEQ ID NO: 15637 - DNA, 21 bp, Homo sapiens
atgtgttcctytccttctttt

SEQ ID NO: 15638 - DNA, 21 bp, Homo sapiens
ggttggaagayagaggtaagc

SEQ ID NO: 15639 - DNA, 21 bp, Homo sapiens
ttttaaaagaytttcttaatt

SEQ ID NO: 15640 - DNA, 21 bp, Homo sapiens
ttaattgtgcrgttaacattt

SEQ ID NO: 15641 - DNA, 21 bp, Homo sapiens
tttcccaaggygctaagattt

SEQ ID NO: 15642 - DNA, 21 bp, Homo sapiens
caatagacacrggtcagagtt

SEQ ID NO: 15643 - DNA, 21 bp, Homo sapiens
gagtttcaatytaattcatcg

SEQ ID NO: 15644 - DNA, 21 bp, Homo sapiens
aaaagtaatargtgataagcc

SEQ ID NO: 15645 - DNA, 21 bp, Homo sapiens
agcattcaatrcagagtaggc

SEQ ID NO: 15646 - DNA, 21 bp, Homo sapiens
ccacacatgaycgactgactt

SEQ ID NO: 15647 - DNA, 21 bp, Homo sapiens
gattccatagrtacccacttt

SEQ ID NO: 15648 - DNA, 21 bp, Homo sapiens
attcttcctcrctatcttcac

SEQ ID NO: 15649 - DNA, 21 bp, Homo sapiens
tacctttcttyctttggagca

SEQ ID NO: 15650 - DNA, 21 bp, Homo sapiens
aacaaaatgcrttttaaagca

SEQ ID NO: 15651 - DNA, 21 bp, Homo sapiens
tggaaaatctrgccagggatg

SEQ ID NO: 15652 - DNA, 21 bp, Homo sapiens
atacatgccayactatctgta

SEQ ID NO: 15653 - DNA, 21 bp, Homo sapiens
ctccatttctrcatgaaccca

SEQ ID NO: 15654 - DNA, 21 bp, Homo sapiens
ttggagctgcrtatctatttt

SEQ ID NO: 15655 - DNA, 21 bp, Homo sapiens
aaccagtgttkccttaggccg

SEQ ID NO: 15656 - DNA, 21 bp, Homo sapiens
gcattacttcygctatgaaag

SEQ ID NO: 15657 - DNA, 21 bp, Homo sapiens
tctcctcatarcaagatattt

SEQ ID NO: 15658 - DNA, 21 bp, Homo sapiens
gtttccactcrtcatctgttt

SEQ ID NO: 15659 - DNA, 21 bp, Homo sapiens
atccttctacrtatcagcaca

SEQ ID NO: 15660 - DNA, 21 bp, Homo sapiens
aaggatgctgkgtcttatttt

SEQ ID NO: 15661 - DNA, 21 bp, Homo sapiens
tttattaattkgcatagagtg

SEQ ID NO: 15662 - DNA, 21 bp, Homo sapiens
gtagttttaaytgataatttc

SEQ ID NO: 15663 - DNA, 21 bp, Homo sapiens
ttcaagctgcrtgttgactta

SEQ ID NO: 15664 - DNA, 21 bp, Homo sapiens
ataacagcttyagctttacac

SEQ ID NO: 15665 - DNA, 21 bp, Homo sapiens
cttccctgagraagacataca

SEQ ID NO: 15666 - DNA, 21 bp, Homo sapiens
tcctaactacrccttattttt

SEQ ID NO: 15667 - DNA, 21 bp, Homo sapiens
gggaaccctcrcacacagttg

SEQ ID NO: 15668 - DNA, 21 bp, Homo sapiens
atgcattagcrtcataaagaa

SEQ ID NO: 15669 - DNA, 21 bp, Homo sapiens
gggaatgaaargagagaggac

SEQ ID NO: 15670 - DNA, 21 bp, Homo sapiens
gctgtgtcaartgattgccta

SEQ ID NO: 15671 - DNA, 21 bp, Homo sapiens
taaatttcaaygaatccttct

SEQ ID NO: 15672 - DNA, 21 bp, Homo sapiens
ggaaatcagtyatctttggca

SEQ ID NO: 15673 - DNA, 21 bp, Homo sapiens
aattgataatrcggatattga

SEQ ID NO: 15674 - DNA, 21 bp, Homo sapiens
tagtctaggaytaatgatttc

SEQ ID NO: 15675 - DNA, 21 bp, Homo sapiens
actccctcgtragtgtaacca

SEQ ID NO: 15676 - DNA, 21 bp, Homo sapiens
ctcgcataagrtgagcccata

SEQ ID NO: 15677 - DNA, 21 bp, Homo sapiens
ttttgggccaytaatagctca

SEQ ID NO: 15678 - DNA, 21 bp, Homo sapiens
tttaatagacygtataagatt

SEQ ID NO: 15679 - DNA, 21 bp, Homo sapiens
ggaattgtatrtatcagtcct

SEQ ID NO: 15680 - DNA, 21 bp, Homo sapiens
tcctcttcttmtaataacaac

SEQ ID NO: 15681 - DNA, 21 bp, Homo sapiens
aaatttatttmtattcccttt

SEQ ID NO: 15682 - DNA, 21 bp, Homo sapiens
agaatgataayatgttttcaa

SEQ ID NO: 15683 - DNA, 21 bp, Homo sapiens
atatgcctctrtcttcaccat

SEQ ID NO: 15684 - DNA, 21 bp, Homo sapiens
gcctttccatragatagatcc

SEQ ID NO: 15685 - DNA, 21 bp, Homo sapiens
tttaggttgartgtttaaacc

SEQ ID NO: 15686 - DNA, 21 bp, Homo sapiens
ttccaggcatmaacaaagata

SEQ ID NO: 15687 - DNA, 21 bp, Homo sapiens
tgtttcttccygtaagaatat

SEQ ID NO: 15688 - DNA, 21 bp, Homo sapiens
gcttggttatkgtgagtctta

SEQ ID NO: 15689 - DNA, 21 bp, Homo sapiens
atagacaatgygctcttagag

SEQ ID NO: 15690 - DNA, 21 bp, Homo sapiens
ccgtctatgcyacaactctta

SEQ ID NO: 15691 - DNA, 21 bp, Homo sapiens
gaaatactatygctggaaaaa

SEQ ID NO: 15692 - DNA, 21 bp, Homo sapiens
ttcttcacaarccttctcgct

SEQ ID NO: 15693 - DNA, 21 bp, Homo sapiens
caggtcctacrggaaagtaaa

SEQ ID NO: 15694 - DNA, 21 bp, Homo sapiens
tgcatccaagrcttcacgtaa

SEQ ID NO: 15695 - DNA, 21 bp, Homo sapiens
tcacctcctcrcttgttcctt

SEQ ID NO: 15696 - DNA, 21 bp, Homo sapiens
tactttttcarttttataagg

SEQ ID NO: 15697 - DNA, 21 bp, Homo sapiens
ctagtgtggtrctaatcctat

SEQ ID NO: 15698 - DNA, 21 bp, Homo sapiens
tctcagcaacraaggctgcca

SEQ ID NO: 15699 - DNA, 21 bp, Homo sapiens
aagttgatctkaaatacatca

SEQ ID NO: 15700 - DNA, 21 bp, Homo sapiens
ttataaccatrtatatctaca

SEQ ID NO: 15701 - DNA, 21 bp, Homo sapiens
gcctctaaatygagatagcag

SEQ ID NO: 15702 - DNA, 21 bp, Homo sapiens
gttctgtaagygcatcatgat

SEQ ID NO: 15703 - DNA, 21 bp, Homo sapiens
attaaatgtgraatggtgttt

SEQ ID NO: 15704 - DNA, 21 bp, Homo sapiens
aaatatagggygaattattgt

SEQ ID NO: 15705 - DNA, 21 bp, Homo sapiens
ttattcttcaygttgttcctg

SEQ ID NO: 15706 - DNA, 21 bp, Homo sapiens
agacaagagargggattgcac

SEQ ID NO: 15707 - DNA, 21 bp, Homo sapiens
gtgtctgctgrtactgactgt

SEQ ID NO: 15708 - DNA, 21 bp, Homo sapiens
cacagttcctytgagatcaca

SEQ ID NO: 15709 - DNA, 21 bp, Homo sapiens
tctgctgaacrtgacaattgg

SEQ ID NO: 15710 - DNA, 21 bp, Homo sapiens
aaaaaaaaaamcacaaaaaca

SEQ ID NO: 15711 - DNA, 21 bp, Homo sapiens
aggtataatckcttgctctca

SEQ ID NO: 15712 - DNA, 21 bp, Homo sapiens
ggtgtagtttygttcacattt

SEQ ID NO: 15713 - DNA, 21 bp, Homo sapiens
gtcttctggaytcttcctggg

SEQ ID NO: 15714 - DNA, 21 bp, Homo sapiens
ttgggaagaarcaaataacca

SEQ ID NO: 15715 - DNA, 21 bp, Homo sapiens
cttgatccagygcagactgtt

SEQ ID NO: 15716 - DNA, 21 bp, Homo sapiens
taatcataggraaaacattgt

SEQ ID NO: 15717 - DNA, 21 bp, Homo sapiens
ctgaatgactrttacagtttg

SEQ ID NO: 15718 - DNA, 21 bp, Homo sapiens
aaagtgagaaytttctatata

SEQ ID NO: 15719 - DNA, 21 bp, Homo sapiens
atttgggtggyttattgtccc

SEQ ID NO: 15720 - DNA, 21 bp, Homo sapiens
cacggtgattrtcagatattt

SEQ ID NO: 15721 - DNA, 21 bp, Homo sapiens
cccctaccccrtcatcaccac

SEQ ID NO: 15722 - DNA, 21 bp, Homo sapiens
ttgtagcgctytctaaaaact

SEQ ID NO: 15723 - DNA, 21 bp, Homo sapiens
tgtttagcccrtaatttcctg

SEQ ID NO: 15724 - DNA, 21 bp, Homo sapiens
agatgagttcmgattcgtaaa

SEQ ID NO: 15725 - DNA, 21 bp, Homo sapiens
agaggcagatrgacccatttt

SEQ ID NO: 15726 - DNA, 21 bp, Homo sapiens
gttaaaacccygctttcttta

SEQ ID NO: 15727 - DNA, 21 bp, Homo sapiens
gctcccttccrgtatgactct

SEQ ID NO: 15728 - DNA, 21 bp, Homo sapiens
gttatggtccrgtcaagagat

SEQ ID NO: 15729 - DNA, 21 bp, Homo sapiens
ttcattttccrtctctgaaat

SEQ ID NO: 15730 - DNA, 21 bp, Homo sapiens
actctgcatcrctcatccacg

SEQ ID NO: 15731 - DNA, 21 bp, Homo sapiens
ctacagcagcrcgtcatatcc

SEQ ID NO: 15732 - DNA, 21 bp, Homo sapiens
cagatttagtycaaggctctg

SEQ ID NO: 15733 - DNA, 21 bp, Homo sapiens
cacattaaccrctgtgtttta

SEQ ID NO: 15734 - DNA, 21 bp, Homo sapiens
gaaaatgactyctaaaatcca

SEQ ID NO: 15735 - DNA, 21 bp, Homo sapiens
ctatggaaagkgagtgggcca

SEQ ID NO: 15736 - DNA, 21 bp, Homo sapiens
ttaaatacccraggggctgga

SEQ ID NO: 15737 - DNA, 21 bp, Homo sapiens
cggggatcagratgtggacat

SEQ ID NO: 15738 - DNA, 21 bp, Homo sapiens
gcacacacacrgcgaacaccc

SEQ ID NO: 15739 - DNA, 21 bp, Homo sapiens
taacacaaacrtgaagtccaa

SEQ ID NO: 15740 - DNA, 21 bp, Homo sapiens
gcaacttgccrtattgcacgt

SEQ ID NO: 15741 - DNA, 21 bp, Homo sapiens
gaccgcatggrcatgggcaaa

SEQ ID NO: 15742 - DNA, 21 bp, Homo sapiens
tgattggttaycctaattaaa

SEQ ID NO: 15743 - DNA, 21 bp, Homo sapiens
agtcacgtccyacctgctctg

SEQ ID NO: 15744 - DNA, 21 bp, Homo sapiens
cattcaggacmtgggggaaga

SEQ ID NO: 15745 - DNA, 21 bp, Homo sapiens
gacttagatcytggatttcta

SEQ ID NO: 15746 - DNA, 21 bp, Homo sapiens
gcgatctccaytctctcatta

SEQ ID NO: 15747 - DNA, 21 bp, Homo sapiens
atgaaaacaayggaaagaacc

SEQ ID NO: 15748 - DNA, 21 bp, Homo sapiens
aggcacaaaaraggctcagaa

SEQ ID NO: 15749 - DNA, 21 bp, Homo sapiens
aactcccaccrgagaggcgct

SEQ ID NO: 15750 - DNA, 21 bp, Homo sapiens
aataaaaaacygttcaacaaa

SEQ ID NO: 15751 - DNA, 21 bp, Homo sapiens
ttttattagtygtcattatta

SEQ ID NO: 15752 - DNA, 21 bp, Homo sapiens
gttaatgaaayaatttttgtt

SEQ ID NO: 15753 - DNA, 21 bp, Homo sapiens
ctattattaayctagatgtag

SEQ ID NO: 15754 - DNA, 21 bp, Homo sapiens
tgaaacttacraatattagtt

SEQ ID NO: 15755 - DNA, 21 bp, Homo sapiens
gacctcttgaytccagagtcc

SEQ ID NO: 15756 - DNA, 21 bp, Homo sapiens
catttcctctrgtctgaaagt

SEQ ID NO: 15757 - DNA, 21 bp, Homo sapiens
gcaaacagcaygtctcagatt

SEQ ID NO: 15758 - DNA, 21 bp, Homo sapiens
aaaattttgcygcaatgatag

SEQ ID NO: 15759 - DNA, 21 bp, Homo sapiens
aaaaaccattygggaaagcat

SEQ ID NO: 15760 - DNA, 21 bp, Homo sapiens
ctttacagaargaagaaattc

SEQ ID NO: 15761 - DNA, 21 bp, Homo sapiens
aacgcagcccycgtgcccagc

SEQ ID NO: 15762 - DNA, 21 bp, Homo sapiens
ccatacttgcycatcttcaga

SEQ ID NO: 15763 - DNA, 21 bp, Homo sapiens
aatcttcagtmaccacaatag

SEQ ID NO: 15764 - DNA, 21 bp, Homo sapiens
ggcgaatgcgrcattcatgga

SEQ ID NO: 15765 - DNA, 21 bp, Homo sapiens
acagagccatrgatgcctgca

SEQ ID NO: 15766 - DNA, 21 bp, Homo sapiens
catagggcaakactgagacag

SEQ ID NO: 15767 - DNA, 21 bp, Homo sapiens
gagcaaagccrcacacatcac

SEQ ID NO: 15768 - DNA, 21 bp, Homo sapiens
taaagtgtggyttgagtgagc

SEQ ID NO: 15769 - DNA, 21 bp, Homo sapiens
cccagtccccygccccccacc

SEQ ID NO: 15770 - DNA, 21 bp, Homo sapiens
agtctagaatygagcaattgt

SEQ ID NO: 15771 - DNA, 21 bp, Homo sapiens
cacgcggttcygcacagactt

SEQ ID NO: 15772 - DNA, 21 bp, Homo sapiens
gtcaatgacamagcagcaatg

SEQ ID NO: 15773 - DNA, 21 bp, Homo sapiens
agtattagggmtttattctct

SEQ ID NO: 15774 - DNA, 21 bp, Homo sapiens
gggtcagcacrtgtgatttaa

SEQ ID NO: 15775 - DNA, 21 bp, Homo sapiens
caagaaaaacyctcaggaacc

SEQ ID NO: 15776 - DNA, 21 bp, Homo sapiens
gtaattttgcycctgtcatca

SEQ ID NO: 15777 - DNA, 21 bp, Homo sapiens
tggaagaacaytgagttttct

SEQ ID NO: 15778 - DNA, 21 bp, Homo sapiens
taaatattgcrgtgtttttag

SEQ ID NO: 15779 - DNA, 21 bp, Homo sapiens
gaaaataacgygctggagcag

SEQ ID NO: 15780 - DNA, 21 bp, Homo sapiens
atgaatcatcytgggcctaag

SEQ ID NO: 15781 - DNA, 21 bp, Homo sapiens
tagattcaatrggatcccagg

SEQ ID NO: 15782 - DNA, 21 bp, Homo sapiens
aaaataactcytgcttgagag

SEQ ID NO: 15783 - DNA, 21 bp, Homo sapiens
ccacttcttcrtcaactaagc

SEQ ID NO: 15784 - DNA, 21 bp, Homo sapiens
ttggatgcccrcataaataac

SEQ ID NO: 15785 - DNA, 21 bp, Homo sapiens
ttgttttgtcrttctgagata

SEQ ID NO: 15786 - DNA, 21 bp, Homo sapiens
gtaccacaatmttactgactc

SEQ ID NO: 15787 - DNA, 21 bp, Homo sapiens
cttgcttctcrttgccttcca

SEQ ID NO: 15788 - DNA, 21 bp, Homo sapiens
cactgtgggcygagcttcctc

SEQ ID NO: 15789 - DNA, 21 bp, Homo sapiens
agaggacatgrtcccagcctg

SEQ ID NO: 15790 - DNA, 21 bp, Homo sapiens
agccattcaayattggaagtt

SEQ ID NO: 15791 - DNA, 21 bp, Homo sapiens
tgggcaaataygtgcagagta

SEQ ID NO: 15792 - DNA, 21 bp, Homo sapiens
caaaagtacaygtaggctgtg

SEQ ID NO: 15793 - DNA, 21 bp, Homo sapiens
acagggctctygatcaatttg

SEQ ID NO: 15794 - DNA, 21 bp, Homo sapiens
cttgtagatgmcttcctaaga

SEQ ID NO: 15795 - DNA, 21 bp, Homo sapiens
agaacttatcrgctcaaaaca

SEQ ID NO: 15796 - DNA, 21 bp, Homo sapiens
cctggagggargatgtcgcac

SEQ ID NO: 15797 - DNA, 21 bp, Homo sapiens
aaacgtgactygaagtttcag

SEQ ID NO: 15798 - DNA, 21 bp, Homo sapiens
agaagacttcrctgtgtgccg

SEQ ID NO: 15799 - DNA, 21 bp, Homo sapiens
cacagaaggtkcaatcccata

SEQ ID NO: 15800 - DNA, 21 bp, Homo sapiens
agcagcccagraactgaaagc

SEQ ID NO: 15801 - DNA, 21 bp, Homo sapiens
ccccaacacayggcagccagt

SEQ ID NO: 15802 - DNA, 21 bp, Homo sapiens
actaagcaaaytgcaactgtg

SEQ ID NO: 15803 - DNA, 21 bp, Homo sapiens
tgagcagggarccccacagtg

SEQ ID NO: 15804 - DNA, 21 bp, Homo sapiens
agaaaaaaaaytgagcttcac

SEQ ID NO: 15805 - DNA, 21 bp, Homo sapiens
caaacacaaaygattcacttt

SEQ ID NO: 15806 - DNA, 21 bp, Homo sapiens
ctagggggagycagtctcatc

SEQ ID NO: 15807 - DNA, 21 bp, Homo sapiens
aagccaacctyggcccggcgt

SEQ ID NO: 15808 - DNA, 21 bp, Homo sapiens
aaagtactcayggattaagtc

SEQ ID NO: 15809 - DNA, 21 bp, Homo sapiens
tgctcaggacrgagtcacatg

SEQ ID NO: 15810 - DNA, 21 bp, Homo sapiens
atcaaaatcaygtagcaaaag

SEQ ID NO: 15811 - DNA, 21 bp, Homo sapiens
tgacaaccagraggatttcag

SEQ ID NO: 15812 - DNA, 21 bp, Homo sapiens
gtaaagaaatrggtgtgttca

SEQ ID NO: 15813 - DNA, 21 bp, Homo sapiens
ctttgtgcccraattgtgcca

SEQ ID NO: 15814 - DNA, 21 bp, Homo sapiens
actattttgaratttttgctg

SEQ ID NO: 15815 - DNA, 21 bp, Homo sapiens
gtagagtattragagagagag

SEQ ID NO: 15816 - DNA, 21 bp, Homo sapiens
actgtttccartggtggagca

SEQ ID NO: 15817 - DNA, 21 bp, Homo sapiens
cctctgccacycactctgctc

SEQ ID NO: 15818 - DNA, 21 bp, Homo sapiens
aaagtacagarcaggtataga

SEQ ID NO: 15819 - DNA, 21 bp, Homo sapiens
gtacagaagtygatgataatc

SEQ ID NO: 15820 - DNA, 21 bp, Homo sapiens
gatcacatggytgtatcttgg

SEQ ID NO: 15821 - DNA, 21 bp, Homo sapiens
tccttgtgcartctaggattg

SEQ ID NO: 15822 - DNA, 21 bp, Homo sapiens
ttggatggaartcagtcttca

SEQ ID NO: 15823 - DNA, 21 bp, Homo sapiens
tctctcttttygtttgcatct

SEQ ID NO: 15824 - DNA, 21 bp, Homo sapiens
tctctttttgytactcttact

SEQ ID NO: 15825 - DNA, 21 bp, Homo sapiens
agtcttcagcygtgcccatta

SEQ ID NO: 15826 - DNA, 21 bp, Homo sapiens
actttcacatrtgttcttata

SEQ ID NO: 15827 - DNA, 21 bp, Homo sapiens
tgaacattatmtagcatgaat

SEQ ID NO: 15828 - DNA, 21 bp, Homo sapiens
aaattagtttrattaagtccc

SEQ ID NO: 15829 - DNA, 21 bp, Homo sapiens
ccccatcccaycctacaaagt

SEQ ID NO: 15830 - DNA, 21 bp, Homo sapiens
ctggcaagccraaaagtgtca

SEQ ID NO: 15831 - DNA, 21 bp, Homo sapiens
tgttctcattmgttgcaaact

SEQ ID NO: 15832 - DNA, 21 bp, Homo sapiens
tcttgcacagrgaagaatcag

SEQ ID NO: 15833 - DNA, 21 bp, Homo sapiens
tattctggctyatagtcattg

SEQ ID NO: 15834 - DNA, 21 bp, Homo sapiens
gcgagccactyaaatgttaat

SEQ ID NO: 15835 - DNA, 21 bp, Homo sapiens
tggatgcttaygtaattttta

SEQ ID NO: 15836 - DNA, 21 bp, Homo sapiens
ccattaattcrtctgtgcata

SEQ ID NO: 15837 - DNA, 21 bp, Homo sapiens
ataaatttccrtaaaattgca

SEQ ID NO: 15838 - DNA, 21 bp, Homo sapiens
ctctgaaatgytggccaaaat

SEQ ID NO: 15839 - DNA, 21 bp, Homo sapiens
ccccgtttttrcagaggaagg

SEQ ID NO: 15840 - DNA, 21 bp, Homo sapiens
ttcccaaaaaragaaaggaca

SEQ ID NO: 15841 - DNA, 21 bp, Homo sapiens
aggatgacgtyttgctacttt

SEQ ID NO: 15842 - DNA, 21 bp, Homo sapiens
tttgagatgcrtttttcactt

SEQ ID NO: 15843 - DNA, 21 bp, Homo sapiens
aatttgtgccraggtaaaaat

SEQ ID NO: 15844 - DNA, 21 bp, Homo sapiens
tattcaacctygtacaggggt

SEQ ID NO: 15845 - DNA, 21 bp, Homo sapiens
tgccgggattmatctccaagc

SEQ ID NO: 15846 - DNA, 21 bp, Homo sapiens
ttagagttccrtaacagttaa

SEQ ID NO: 15847 - DNA, 21 bp, Homo sapiens
tggaggtgttkatggagagaa

SEQ ID NO: 15848 - DNA, 21 bp, Homo sapiens
gttcccaaagraggaatgctt

SEQ ID NO: 15849 - DNA, 21 bp, Homo sapiens
ctataaggtgyctttccttca

SEQ ID NO: 15850 - DNA, 21 bp, Homo sapiens
ataactttggmaaaataagaa

SEQ ID NO: 15851 - DNA, 21 bp, Homo sapiens
tgagtggtagyctaccaaaag

SEQ ID NO: 15852 - DNA, 21 bp, Homo sapiens
tttcttgaaamtatgaccttt

SEQ ID NO: 15853 - DNA, 21 bp, Homo sapiens
ccacgatgttraatctattaa

SEQ ID NO: 15854 - DNA, 21 bp, Homo sapiens
taagtatttcmatttctagtc

SEQ ID NO: 15855 - DNA, 21 bp, Homo sapiens
tttttaatacrtattatatat

SEQ ID NO: 15856 - DNA, 21 bp, Homo sapiens
actgaagtacrttcatggaaa

SEQ ID NO: 15857 - DNA, 21 bp, Homo sapiens
taacactgcartcaccagctg

SEQ ID NO: 15858 - DNA, 21 bp, Homo sapiens
gtagtaagtaygtacatttgc

SEQ ID NO: 15859 - DNA, 21 bp, Homo sapiens
ctttcattatrtaattgtcaa

SEQ ID NO: 15860 - DNA, 21 bp, Homo sapiens
gcctcagtttycagttctaat

SEQ ID NO: 15861 - DNA, 21 bp, Homo sapiens
tttgttgaaakgggtatacat

SEQ ID NO: 15862 - DNA, 21 bp, Homo sapiens
tattccattcraaatttagaa

SEQ ID NO: 15863 - DNA, 21 bp, Homo sapiens
aaaatagttayagaatgcact

SEQ ID NO: 15864 - DNA, 21 bp, Homo sapiens
tggatgactgktttttctcaa

SEQ ID NO: 15865 - DNA, 21 bp, Homo sapiens
aattaataacyaacaacatac

SEQ ID NO: 15866 - DNA, 21 bp, Homo sapiens
gaatatctaaratcatgccac

SEQ ID NO: 15867 - DNA, 21 bp, Homo sapiens
cctgtgagggyctgctaagca

SEQ ID NO: 15868 - DNA, 21 bp, Homo sapiens
acagttgctgyagttttgctt

SEQ ID NO: 15869 - DNA, 21 bp, Homo sapiens
attaaatgtgmattcaccaac

SEQ ID NO: 15870 - DNA, 21 bp, Homo sapiens
ctaggactctrtaatgtctat

SEQ ID NO: 15871 - DNA, 21 bp, Homo sapiens
tgatgatttcycttctacctt

SEQ ID NO: 15872 - DNA, 21 bp, Homo sapiens
gttctataatkttattgttac

SEQ ID NO: 15873 - DNA, 21 bp, Homo sapiens
ccagagaaagkaaacattccc

SEQ ID NO: 15874 - DNA, 21 bp, Homo sapiens
tcaggctgcartaatgccatt

SEQ ID NO: 15875 - DNA, 21 bp, Homo sapiens
ttcagcttcartaaatactgc

SEQ ID NO: 15876 - DNA, 21 bp, Homo sapiens
atatactgagkttactaagat

SEQ ID NO: 15877 - DNA, 21 bp, Homo sapiens
tcatcgtgccrcacttttaca

SEQ ID NO: 15878 - DNA, 21 bp, Homo sapiens
gtattgatttkactatggaag

SEQ ID NO: 15879 - DNA, 21 bp, Homo sapiens
attacatgtaytgataaaacc

SEQ ID NO: 15880 - DNA, 21 bp, Homo sapiens
agtctattgcrtagtggagtg

SEQ ID NO: 15881 - DNA, 21 bp, Homo sapiens
atctccccctmaagacccagc

SEQ ID NO: 15882 - DNA, 21 bp, Homo sapiens
atctaaactcmttaacttggc

SEQ ID NO: 15883 - DNA, 21 bp, Homo sapiens
ttaaattataygtctgtgaaa

SEQ ID NO: 15884 - DNA, 21 bp, Homo sapiens
gatccaaagayattacccaca

SEQ ID NO: 15885 - DNA, 21 bp, Homo sapiens
ggtccctcccrggtgatggac

SEQ ID NO: 15886 - DNA, 21 bp, Homo sapiens
gtattggtgcyatcgcctcca

SEQ ID NO: 15887 - DNA, 21 bp, Homo sapiens
cagcactttcrtatttagaaa

SEQ ID NO: 15888 - DNA, 21 bp, Homo sapiens
accagcaagargaggatctgc

SEQ ID NO: 15889 - DNA, 21 bp, Homo sapiens
atgggaatgtytgaatttgta

SEQ ID NO: 15890 - DNA, 21 bp, Homo sapiens
catgaacgagycaacttaaca

SEQ ID NO: 15891 - DNA, 21 bp, Homo sapiens
gttctcctcargatgacttcc

SEQ ID NO: 15892 - DNA, 21 bp, Homo sapiens
ggaagctgttktgacataagt

SEQ ID NO: 15893 - DNA, 21 bp, Homo sapiens
tgttccctctrtctggaacat

SEQ ID NO: 15894 - DNA, 21 bp, Homo sapiens
ttccaacaggygtatgggtgc

SEQ ID NO: 15895 - DNA, 21 bp, Homo sapiens
tcacccgccarcctcttccca

SEQ ID NO: 15896 - DNA, 21 bp, Homo sapiens
tgggaacgagkgatgtgtaga

SEQ ID NO: 15897 - DNA, 21 bp, Homo sapiens
tccgccttgcmgattttcata

SEQ ID NO: 15898 - DNA, 21 bp, Homo sapiens
gttttgttccraggaagatat

SEQ ID NO: 15899 - DNA, 21 bp, Homo sapiens
acaaaggatamagatgaatag

SEQ ID NO: 15900 - DNA, 21 bp, Homo sapiens
ttatgagggamgttcactttc

SEQ ID NO: 15901 - DNA, 21 bp, Homo sapiens
gcccagggatyatgaagccag

SEQ ID NO: 15902 - DNA, 21 bp, Homo sapiens
aataaaccacraaaactagga

SEQ ID NO: 15903 - DNA, 21 bp, Homo sapiens
tttccacagtyagctgccatt

SEQ ID NO: 15904 - DNA, 21 bp, Homo sapiens
tcttattggtytactgaatcg

SEQ ID NO: 15905 - DNA, 21 bp, Homo sapiens
atattattttrgtctgttttt

SEQ ID NO: 15906 - DNA, 21 bp, Homo sapiens
tgttttcacaygaataaacag

SEQ ID NO: 15907 - DNA, 21 bp, Homo sapiens
ttaagattcartgcaattccc

SEQ ID NO: 15908 - DNA, 21 bp, Homo sapiens
tcactaaaccytgtgaattct

SEQ ID NO: 15909 - DNA, 21 bp, Homo sapiens
tctgtgaaatkaaataattaa

SEQ ID NO: 15910 - DNA, 21 bp, Homo sapiens
aaactgtattkttctaggtgg

SEQ ID NO: 15911 - DNA, 21 bp, Homo sapiens
attgttcaagrgtcaaaagta

SEQ ID NO: 15912 - DNA, 21 bp, Homo sapiens
tttgaaaactrtgtttgtaat

SEQ ID NO: 15913 - DNA, 21 bp, Homo sapiens
aatagcaaacrtaccgtcttc

SEQ ID NO: 15914 - DNA, 21 bp, Homo sapiens
gcctcccctckgaagctgata

SEQ ID NO: 15915 - DNA, 21 bp, Homo sapiens
gctttcagttrtacacgttca

SEQ ID NO: 15916 - DNA, 21 bp, Homo sapiens
agaaagcagamagtagtatgt

SEQ ID NO: 15917 - DNA, 21 bp, Homo sapiens
aatgctttgcytcctgttctg

SEQ ID NO: 15918 - DNA, 21 bp, Homo sapiens
ttaattaaggrtgtttttcag

SEQ ID NO: 15919 - DNA, 21 bp, Homo sapiens
agttttccctrttctgtggat

SEQ ID NO: 15920 - DNA, 21 bp, Homo sapiens
aattataatcytgcaataaac

SEQ ID NO: 15921 - DNA, 21 bp, Homo sapiens
taattgactaygcattctcta

SEQ ID NO: 15922 - DNA, 21 bp, Homo sapiens
ggcttcctatygggttttgcc

SEQ ID NO: 15923 - DNA, 21 bp, Homo sapiens
gaggcattgtygggaggtaga

SEQ ID NO: 15924 - DNA, 21 bp, Homo sapiens
gggtgaggggrgactactgtt

SEQ ID NO: 15925 - DNA, 21 bp, Homo sapiens
ttttttttacyggctcttttc

SEQ ID NO: 15926 - DNA, 21 bp, Homo sapiens
cttctttcaamatatgattct

SEQ ID NO: 15927 - DNA, 21 bp, Homo sapiens
tggaataaaakaataggcctt

SEQ ID NO: 15928 - DNA, 21 bp, Homo sapiens
gtgctggataycaaaggtccg

SEQ ID NO: 15929 - DNA, 21 bp, Homo sapiens
gtggcacagtrttcttggcct

SEQ ID NO: 15930 - DNA, 21 bp, Homo sapiens
tttggactgcytgtcaaaagc

SEQ ID NO: 15931 - DNA, 21 bp, Homo sapiens
ttgtcacgacytggcatttag

SEQ ID NO: 15932 - DNA, 21 bp, Homo sapiens
atatctgttcrtattctgtct

SEQ ID NO: 15933 - DNA, 21 bp, Homo sapiens
gccgatactgygtctgtagca

SEQ ID NO: 15934 - DNA, 21 bp, Homo sapiens
tcattattatyatcagtaatg

SEQ ID NO: 15935 - DNA, 21 bp, Homo sapiens
tttactttcayggaagcccct

SEQ ID NO: 15936 - DNA, 21 bp, Homo sapiens
ggaaaatgaaytggaggaagg

SEQ ID NO: 15937 - DNA, 21 bp, Homo sapiens
aacagctcagkggctgcctct

SEQ ID NO: 15938 - DNA, 21 bp, Homo sapiens
agtgctggaayctggaagtgt

SEQ ID NO: 15939 - DNA, 21 bp, Homo sapiens
taccactggarcagaagataa

SEQ ID NO: 15940 - DNA, 21 bp, Homo sapiens
ggctatgatcrcacctctcct

SEQ ID NO: 15941 - DNA, 21 bp, Homo sapiens
agccaaagatrtaatattttg

SEQ ID NO: 15942 - DNA, 21 bp, Homo sapiens
tttctctccgkagtacatgag

SEQ ID NO: 15943 - DNA, 21 bp, Homo sapiens
gaaattcacayggacagggga

SEQ ID NO: 15944 - DNA, 21 bp, Homo sapiens
aaaaaatataraaaatgcata

SEQ ID NO: 15945 - DNA, 21 bp, Homo sapiens
tagtaaatgarcaaaagacaa

SEQ ID NO: 15946 - DNA, 21 bp, Homo sapiens
tttacctcacyaggatctaaa

SEQ ID NO: 15947 - DNA, 21 bp, Homo sapiens
aagttgtatayaccatttaga

SEQ ID NO: 15948 - DNA, 21 bp, Homo sapiens
tattttccccygcgagttaaa

SEQ ID NO: 15949 - DNA, 21 bp, Homo sapiens
taaaatcaagratgactgctt

SEQ ID NO: 15950 - DNA, 21 bp, Homo sapiens
atcagttcccrtcctctacta

SEQ ID NO: 15951 - DNA, 21 bp, Homo sapiens
tcaaagctaaygtcagaaatg

SEQ ID NO: 15952 - DNA, 21 bp, Homo sapiens
tgtgatgtccktctacatgtt

SEQ ID NO: 15953 - DNA, 21 bp, Homo sapiens
ctcctcaactktctccattct

SEQ ID NO: 15954 - DNA, 21 bp, Homo sapiens
attaaaatcayacctgtttat

SEQ ID NO: 15955 - DNA, 21 bp, Homo sapiens
tgaggttaacmaagttgcatt

SEQ ID NO: 15956 - DNA, 21 bp, Homo sapiens
atttttgagcyattgcaaaaa

SEQ ID NO: 15957 - DNA, 21 bp, Homo sapiens
tggcctgttgmcaacttctga

SEQ ID NO: 15958 - DNA, 21 bp, Homo sapiens
aggggcaaggyactttgtgct

SEQ ID NO: 15959 - DNA, 21 bp, Homo sapiens
aatagaggaayggaaagtttt

SEQ ID NO: 15960 - DNA, 21 bp, Homo sapiens
cagtatagtcyatatgcctat

SEQ ID NO: 15961 - DNA, 21 bp, Homo sapiens
actcaagagakctgtttattg

SEQ ID NO: 15962 - DNA, 21 bp, Homo sapiens
tatctggcacrtagggaaaga

SEQ ID NO: 15963 - DNA, 21 bp, Homo sapiens
agaggtggtcyatccaagaag

SEQ ID NO: 15964 - DNA, 21 bp, Homo sapiens
ccaaaatgtgmttgtttcttt

SEQ ID NO: 15965 - DNA, 21 bp, Homo sapiens
catttttaatycctttagcca

SEQ ID NO: 15966 - DNA, 21 bp, Homo sapiens
tagagagttaygtttttaatt

SEQ ID NO: 15967 - DNA, 21 bp, Homo sapiens
gagaataccaytgggatgctg

SEQ ID NO: 15968 - DNA, 21 bp, Homo sapiens
atatcaccttrttggcaaaga

SEQ ID NO: 15969 - DNA, 21 bp, Homo sapiens
aactagaggcyttaacttaaa

SEQ ID NO: 15970 - DNA, 21 bp, Homo sapiens
gtttcatatcrtgtgtaccgg

SEQ ID NO: 15971 - DNA, 21 bp, Homo sapiens
gaacacatggrgtatgtgatt

SEQ ID NO: 15972 - DNA, 21 bp, Homo sapiens
cacaagggatygtaaaggaag

SEQ ID NO: 15973 - DNA, 21 bp, Homo sapiens
tagtcagagaygggacattac

SEQ ID NO: 15974 - DNA, 21 bp, Homo sapiens
ggtgatggaaytggctgtgaa

SEQ ID NO: 15975 - DNA, 21 bp, Homo sapiens
ggaaatgtcayatagtgttgc

SEQ ID NO: 15976 - DNA, 21 bp, Homo sapiens
aattgtcccaygttttagttt

SEQ ID NO: 15977 - DNA, 21 bp, Homo sapiens
gtttaatctaygaccagcaag

SEQ ID NO: 15978 - DNA, 21 bp, Homo sapiens
ctggctactgktttttgctgg

SEQ ID NO: 15979 - DNA, 21 bp, Homo sapiens
tctcagctacytacatctgca

SEQ ID NO: 15980 - DNA, 21 bp, Homo sapiens
tagctggttcyaagttcaaaa

SEQ ID NO: 15981 - DNA, 21 bp, Homo sapiens
taacttatctrgaatctcaag

SEQ ID NO: 15982 - DNA, 21 bp, Homo sapiens
atcctttggcmtattgaatat

SEQ ID NO: 15983 - DNA, 21 bp, Homo sapiens
ataaccaaccytacccaatgt

SEQ ID NO: 15984 - DNA, 21 bp, Homo sapiens
atgacaactayggacatgact

SEQ ID NO: 15985 - DNA, 21 bp, Homo sapiens
gatttctagayacatacatca

SEQ ID NO: 15986 - DNA, 21 bp, Homo sapiens
gtgtagaatarggagctgttt

SEQ ID NO: 15987 - DNA, 21 bp, Homo sapiens
ggaaacttttrtcttccattg

SEQ ID NO: 15988 - DNA, 21 bp, Homo sapiens
gaaaggacttrtattcagaat

SEQ ID NO: 15989 - DNA, 21 bp, Homo sapiens
tacatgtctgmagttgaaagc

SEQ ID NO: 15990 - DNA, 21 bp, Homo sapiens
ctataacagtracaattccct

SEQ ID NO: 15991 - DNA, 21 bp, Homo sapiens
tgcaaagagtyaatagactgt

SEQ ID NO: 15992 - DNA, 21 bp, Homo sapiens
ttggagggtayatcatccagt

SEQ ID NO: 15993 - DNA, 21 bp, Homo sapiens
gaatgagtcayctgtgcattt

SEQ ID NO: 15994 - DNA, 21 bp, Homo sapiens
tcacaaacatygtcaaacgtc

SEQ ID NO: 15995 - DNA, 21 bp, Homo sapiens
gggagaataaygtaactaaat

SEQ ID NO: 15996 - DNA, 21 bp, Homo sapiens
atttttatacmgtcagaaata

SEQ ID NO: 15997 - DNA, 21 bp, Homo sapiens
gaaaagtatgycccaaacacc

SEQ ID NO: 15998 - DNA, 21 bp, Homo sapiens
ctatactcaamatacttgtag

SEQ ID NO: 15999 - DNA, 21 bp, Homo sapiens
aagactaaccrgtgtgttgtg

SEQ ID NO: 16000 - DNA, 21 bp, Homo sapiens
aagattggcaragattaagaa

SEQ ID NO: 16001 - DNA, 21 bp, Homo sapiens
ggacttcctcrtccttttaag

SEQ ID NO: 16002 - DNA, 21 bp, Homo sapiens
caggaacccargtacacacac

SEQ ID NO: 16003 - DNA, 21 bp, Homo sapiens
agcaattttckaaaattttca

SEQ ID NO: 16004 - DNA, 21 bp, Homo sapiens
ctccagtgtakgtatttttat

SEQ ID NO: 16005 - DNA, 21 bp, Homo sapiens
ggatatagttktaaccgaaga

SEQ ID NO: 16006 - DNA, 21 bp, Homo sapiens
cgtggtgttgyatatatgtaa

SEQ ID NO: 16007 - DNA, 21 bp, Homo sapiens
aatgtttaaargcatctctgg

SEQ ID NO: 16008 - DNA, 21 bp, Homo sapiens
tatgaatgacragcaggatat

SEQ ID NO: 16009 - DNA, 21 bp, Homo sapiens
tgaatgttatrtgtatactga

SEQ ID NO: 16010 - DNA, 21 bp, Homo sapiens
gtgccttctaktgttagtccc

SEQ ID NO: 16011 - DNA, 21 bp, Homo sapiens
ttttgaggaartgctacacca

SEQ ID NO: 16012 - DNA, 21 bp, Homo sapiens
tctatttaggrcctacctcta

SEQ ID NO: 16013 - DNA, 21 bp, Homo sapiens
agatttctacmtgagagtcct

SEQ ID NO: 16014 - DNA, 21 bp, Homo sapiens
ttgacctttaytgtgcctgtc

SEQ ID NO: 16015 - DNA, 21 bp, Homo sapiens
caagcaccatyggtccacctt

SEQ ID NO: 16016 - DNA, 21 bp, Homo sapiens
aagtcctacarttacagccga

SEQ ID NO: 16017 - DNA, 21 bp, Homo sapiens
caaaattcagmaggcacaaaa

SEQ ID NO: 16018 - DNA, 21 bp, Homo sapiens
tgggagtatcytttcctttgc

SEQ ID NO: 16019 - DNA, 21 bp, Homo sapiens
ttggtttatayggcctcaggt

SEQ ID NO: 16020 - DNA, 21 bp, Homo sapiens
tataacattargaaatattaa

SEQ ID NO: 16021 - DNA, 21 bp, Homo sapiens
accacatggcyttttattctc

SEQ ID NO: 16022 - DNA, 21 bp, Homo sapiens
catttacactragatctgaaa

SEQ ID NO: 16023 - DNA, 21 bp, Homo sapiens
catcacctctrtatcttctca

SEQ ID NO: 16024 - DNA, 21 bp, Homo sapiens
tagctgtcacyagttttcctc

SEQ ID NO: 16025 - DNA, 21 bp, Homo sapiens
gaatatcttcrgcgttatttc

SEQ ID NO: 16026 - DNA, 21 bp, Homo sapiens
tcagggctctrggtcggcatc

SEQ ID NO: 16027 - DNA, 21 bp, Homo sapiens
ttagaagaagytggaaggaaa

SEQ ID NO: 16028 - DNA, 21 bp, Homo sapiens
aaaaaaaaagycattgtagat

SEQ ID NO: 16029 - DNA, 21 bp, Homo sapiens
gccaaataaamgctggagctc

SEQ ID NO: 16030 - DNA, 21 bp, Homo sapiens
tctcttcatgyagaaagtgat

SEQ ID NO: 16031 - DNA, 21 bp, Homo sapiens
tctatatacaytatccccttt

SEQ ID NO: 16032 - DNA, 21 bp, Homo sapiens
ggaatagaaaytgtcattcta

SEQ ID NO: 16033 - DNA, 21 bp, Homo sapiens
tttcattctgkttttgaagcc

SEQ ID NO: 16034 - DNA, 21 bp, Homo sapiens
gggtttgttcrggtggcagca

SEQ ID NO: 16035 - DNA, 21 bp, Homo sapiens
tacatttcatrgtataattat

SEQ ID NO: 16036 - DNA, 21 bp, Homo sapiens
atgtaattaamgatccaggga

SEQ ID NO: 16037 - DNA, 21 bp, Homo sapiens
ctgcatatgtrgtgaggtcta

SEQ ID NO: 16038 - DNA, 21 bp, Homo sapiens
aaggctgaccyatgtggccat

SEQ ID NO: 16039 - DNA, 21 bp, Homo sapiens
cctaagggaargtcagcttgt

SEQ ID NO: 16040 - DNA, 21 bp, Homo sapiens
aagcccttackaacaaaagat

SEQ ID NO: 16041 - DNA, 21 bp, Homo sapiens
agaggtctttmcctttctctt

SEQ ID NO: 16042 - DNA, 21 bp, Homo sapiens
agcctggcttygttctctcaa

SEQ ID NO: 16043 - DNA, 21 bp, Homo sapiens
ctgttggtctrtaggcttatt

SEQ ID NO: 16044 - DNA, 21 bp, Homo sapiens
ttgtgtaatayacttttcctg

SEQ ID NO: 16045 - DNA, 21 bp, Homo sapiens
gaacctgacartattgaatgt

SEQ ID NO: 16046 - DNA, 21 bp, Homo sapiens
tctaggagcayctacccatgg

SEQ ID NO: 16047 - DNA, 21 bp, Homo sapiens
ttaggaaaatktccctccttc

SEQ ID NO: 16048 - DNA, 21 bp, Homo sapiens
aaccagttgayggacttcacc

SEQ ID NO: 16049 - DNA, 21 bp, Homo sapiens
cctttcccagyccaatttcca

SEQ ID NO: 16050 - DNA, 21 bp, Homo sapiens
aaaatgggagyttgggttgca

SEQ ID NO: 16051 - DNA, 21 bp, Homo sapiens
aggaggcttgygttttctgac

SEQ ID NO: 16052 - DNA, 21 bp, Homo sapiens
ggtgggagaargctggaatac

SEQ ID NO: 16053 - DNA, 21 bp, Homo sapiens
ggctcagacayggttcttgtc

SEQ ID NO: 16054 - DNA, 21 bp, Homo sapiens
tggccgcttgrctagagaaca

SEQ ID NO: 16055 - DNA, 21 bp, Homo sapiens
ccaatatccarttatctccaa

SEQ ID NO: 16056 - DNA, 21 bp, Homo sapiens
aggtcctatgygatgtgctcc

SEQ ID NO: 16057 - DNA, 21 bp, Homo sapiens
gctctgcgggyggtagaaagc

SEQ ID NO: 16058 - DNA, 21 bp, Homo sapiens
ctgaagattaygccctgattc

SEQ ID NO: 16059 - DNA, 21 bp, Homo sapiens
taaagcatccrttgagagata

SEQ ID NO: 16060 - DNA, 21 bp, Homo sapiens
gcaagaatatrgagaactagg

SEQ ID NO: 16061 - DNA, 21 bp, Homo sapiens
attaacttaaytgtcctcttt

SEQ ID NO: 16062 - DNA, 21 bp, Homo sapiens
aaatagctacyactttaatta

SEQ ID NO: 16063 - DNA, 21 bp, Homo sapiens
gcaacaagtarttttccaact

SEQ ID NO: 16064 - DNA, 21 bp, Homo sapiens
atcaaaaagcygatgaactcc

SEQ ID NO: 16065 - DNA, 21 bp, Homo sapiens
ttccacttgamtaaggcagta

SEQ ID NO: 16066 - DNA, 21 bp, Homo sapiens
ttcactctgcraagttgtcac

SEQ ID NO: 16067 - DNA, 21 bp, Homo sapiens
gaggatgtaayggagttttca

SEQ ID NO: 16068 - DNA, 21 bp, Homo sapiens
aggattgagaygtaaaaatct

SEQ ID NO: 16069 - DNA, 21 bp, Homo sapiens
aattttattaygacctatatt

SEQ ID NO: 16070 - DNA, 21 bp, Homo sapiens
aaaattttaakcattatttta

SEQ ID NO: 16071 - DNA, 21 bp, Homo sapiens
ctaggtgactytttctgatct

SEQ ID NO: 16072 - DNA, 21 bp, Homo sapiens
cactcctcccktaggcaattc

SEQ ID NO: 16073 - DNA, 21 bp, Homo sapiens
ggtttagggaytccaggatct

SEQ ID NO: 16074 - DNA, 21 bp, Homo sapiens
gtcgtatctgrtactcttcga

SEQ ID NO: 16075 - DNA, 21 bp, Homo sapiens
acagcttgttktgtttcatac

SEQ ID NO: 16076 - DNA, 21 bp, Homo sapiens
attacaatttmaaaacagtac

SEQ ID NO: 16077 - DNA, 21 bp, Homo sapiens
gatgtgctaartgttgccaga

SEQ ID NO: 16078 - DNA, 21 bp, Homo sapiens
gactttctttygcctagaaaa

SEQ ID NO: 16079 - DNA, 21 bp, Homo sapiens
aattaaacagmtatccaataa

SEQ ID NO: 16080 - DNA, 21 bp, Homo sapiens
atgtttgaacraaaataaaat

SEQ ID NO: 16081 - DNA, 21 bp, Homo sapiens
tagacaacgckgcagtctcca

SEQ ID NO: 16082 - DNA, 21 bp, Homo sapiens
cagataggcamgagaagtagc

SEQ ID NO: 16083 - DNA, 21 bp, Homo sapiens
tcaagaaaagycttccagctg

SEQ ID NO: 16084 - DNA, 21 bp, Homo sapiens
aggaagagttrtgggaggaag

SEQ ID NO: 16085 - DNA, 21 bp, Homo sapiens
agaaaaagtgmttttcactgt

SEQ ID NO: 16086 - DNA, 21 bp, Homo sapiens
aatctctgaayacagggaaat

SEQ ID NO: 16087 - DNA, 21 bp, Homo sapiens
taaatcacatrtctccacttc

SEQ ID NO: 16088 - DNA, 21 bp, Homo sapiens
ttgatggctaygtccttataa

SEQ ID NO: 16089 - DNA, 21 bp, Homo sapiens
tcagacgtagyagataagacc

SEQ ID NO: 16090 - DNA, 21 bp, Homo sapiens
aaaaaaccccrtaaaccgttg

SEQ ID NO: 16091 - DNA, 21 bp, Homo sapiens
ctcatctttcmaattcctcag

SEQ ID NO: 16092 - DNA, 21 bp, Homo sapiens
atgtgaaagaygagactcaca

SEQ ID NO: 16093 - DNA, 21 bp, Homo sapiens
gaaaatagacrttcaaattgc

SEQ ID NO: 16094 - DNA, 21 bp, Homo sapiens
tgtagaaaagrctctttttga

SEQ ID NO: 16095 - DNA, 21 bp, Homo sapiens
tagtctctctrccaactcatc

SEQ ID NO: 16096 - DNA, 21 bp, Homo sapiens
taaccccaaayacaatcctag

SEQ ID NO: 16097 - DNA, 21 bp, Homo sapiens
aagacttacaytttttgctac

SEQ ID NO: 16098 - DNA, 21 bp, Homo sapiens
atatggtcaaraatatagtga

SEQ ID NO: 16099 - DNA, 21 bp, Homo sapiens
ctgttcaacckcaatatggcc

SEQ ID NO: 16100 - DNA, 21 bp, Homo sapiens
aattctttacrtttaatagct

SEQ ID NO: 16101 - DNA, 21 bp, Homo sapiens
ttgcacctcamttttggtgcc

SEQ ID NO: 16102 - DNA, 21 bp, Homo sapiens
ggctccagccraagaccaaga

SEQ ID NO: 16103 - DNA, 21 bp, Homo sapiens
gtttatgtccmtataccaact

SEQ ID NO: 16104 - DNA, 21 bp, Homo sapiens
taaaaaccaayccattggctt

SEQ ID NO: 16105 - DNA, 21 bp, Homo sapiens
gtgcagaaagyaaattgataa

SEQ ID NO: 16106 - DNA, 21 bp, Homo sapiens
tcccttaagcmcattcaaaca

SEQ ID NO: 16107 - DNA, 21 bp, Homo sapiens
ttgttgaaggmctttctttat

SEQ ID NO: 16108 - DNA, 21 bp, Homo sapiens
caagaaagacrtagcaagttg

SEQ ID NO: 16109 - DNA, 21 bp, Homo sapiens
acaaggttgtyacagtcagaa

SEQ ID NO: 16110 - DNA, 21 bp, Homo sapiens
cctccaatccyagtctccaaa

SEQ ID NO: 16111 - DNA, 21 bp, Homo sapiens
cactatccatkttatatatgt

SEQ ID NO: 16112 - DNA, 21 bp, Homo sapiens
gaaaaatgcaygggcaggtaa

SEQ ID NO: 16113 - DNA, 21 bp, Homo sapiens
aaccaaacacrttccccatac

SEQ ID NO: 16114 - DNA, 21 bp, Homo sapiens
aatgcccaacrtttcaaatct

SEQ ID NO: 16115 - DNA, 21 bp, Homo sapiens
agtagtgaaargttgtgcaga

SEQ ID NO: 16116 - DNA, 21 bp, Homo sapiens
ttggggctcgrtttttgctta

SEQ ID NO: 16117 - DNA, 21 bp, Homo sapiens
tgacaaggatrtagaacaaca

SEQ ID NO: 16118 - DNA, 21 bp, Homo sapiens
gagccatttcktttccgctga

SEQ ID NO: 16119 - DNA, 21 bp, Homo sapiens
tcgttcattcrataggtagag

SEQ ID NO: 16120 - DNA, 21 bp, Homo sapiens
ttcttaacaartgctagagga

SEQ ID NO: 16121 - DNA, 21 bp, Homo sapiens
gattaatgaaraataaaggat

SEQ ID NO: 16122 - DNA, 21 bp, Homo sapiens
aatgatgtcaragttttctta

SEQ ID NO: 16123 - DNA, 21 bp, Homo sapiens
aactaaggttyaggcaaataa

SEQ ID NO: 16124 - DNA, 21 bp, Homo sapiens
tagcagtgatktgtgtgtgtg

SEQ ID NO: 16125 - DNA, 21 bp, Homo sapiens
tgatttgtttkgagtcaagtt

SEQ ID NO: 16126 - DNA, 21 bp, Homo sapiens
ctaagtcttcmaatcatttcc

SEQ ID NO: 16127 - DNA, 21 bp, Homo sapiens
aaaggagtagrgagcagcctt

SEQ ID NO: 16128 - DNA, 21 bp, Homo sapiens
tgtggtctacytggaagtaaa

SEQ ID NO: 16129 - DNA, 21 bp, Homo sapiens
gtcacttattrtatgatgcca

SEQ ID NO: 16130 - DNA, 21 bp, Homo sapiens
atcatttccartaattttcct

SEQ ID NO: 16131 - DNA, 21 bp, Homo sapiens
actaattaaayaatccttctc

SEQ ID NO: 16132 - DNA, 21 bp, Homo sapiens
agcagaaaaartgtgtcaccc

SEQ ID NO: 16133 - DNA, 21 bp, Homo sapiens
atatctatcaytaacagaaac

SEQ ID NO: 16134 - DNA, 21 bp, Homo sapiens
gtcatccagartctgtttcta

SEQ ID NO: 16135 - DNA, 21 bp, Homo sapiens
ttttttaacargaggtttaac

SEQ ID NO: 16136 - DNA, 21 bp, Homo sapiens
ccttctggtcrtctgattcta

SEQ ID NO: 16137 - DNA, 21 bp, Homo sapiens
aaatattcagyccattgtacc

SEQ ID NO: 16138 - DNA, 21 bp, Homo sapiens
attacattcamctagtcctgt

SEQ ID NO: 16139 - DNA, 21 bp, Homo sapiens
gactttgatgyccaaatctta

SEQ ID NO: 16140 - DNA, 21 bp, Homo sapiens
gggagtctcartgataaaaga

SEQ ID NO: 16141 - DNA, 21 bp, Homo sapiens
gcatgttcccrtaatttattt

SEQ ID NO: 16142 - DNA, 21 bp, Homo sapiens
attatgaattmatggcatatg

SEQ ID NO: 16143 - DNA, 21 bp, Homo sapiens
ttaaatggtgytactcttcat

SEQ ID NO: 16144 - DNA, 21 bp, Homo sapiens
ttacctggcargttgaggctg

SEQ ID NO: 16145 - DNA, 21 bp, Homo sapiens
agtaagaactrgaacaagaca

SEQ ID NO: 16146 - DNA, 21 bp, Homo sapiens
ctactcaactrttagaatagc

SEQ ID NO: 16147 - DNA, 21 bp, Homo sapiens
ttgcctaagcyaccttagtaa

SEQ ID NO: 16148 - DNA, 21 bp, Homo sapiens
acagtaagtaraatagcctat

SEQ ID NO: 16149 - DNA, 21 bp, Homo sapiens
tttaagtttamaacctcagaa

SEQ ID NO: 16150 - DNA, 21 bp, Homo sapiens
cagtggtttcktcaatgtcct

SEQ ID NO: 16151 - DNA, 21 bp, Homo sapiens
tctgaactccyttctttacct

SEQ ID NO: 16152 - DNA, 21 bp, Homo sapiens
tcaacatatcrgttttctgaa

SEQ ID NO: 16153 - DNA, 21 bp, Homo sapiens
tgtctttgtcraaactagtcc

SEQ ID NO: 16154 - DNA, 21 bp, Homo sapiens
agcacagcacyctggaagcac

SEQ ID NO: 16155 - DNA, 21 bp, Homo sapiens
ttctttttgtyaaggatcagg

SEQ ID NO: 16156 - DNA, 21 bp, Homo sapiens
agactatccayggtatcagta

SEQ ID NO: 16157 - DNA, 21 bp, Homo sapiens
caacatcacayaatcaggatg

SEQ ID NO: 16158 - DNA, 21 bp, Homo sapiens
tgcttcagcakctccatggat

SEQ ID NO: 16159 - DNA, 21 bp, Homo sapiens
tcattcacctyggggtgctgt

SEQ ID NO: 16160 - DNA, 21 bp, Homo sapiens
cctttcttggygctctctccc

SEQ ID NO: 16161 - DNA, 21 bp, Homo sapiens
gagcttagatktccctattgt

SEQ ID NO: 16162 - DNA, 21 bp, Homo sapiens
cttaaaatatyccattttaga

SEQ ID NO: 16163 - DNA, 21 bp, Homo sapiens
ttctaccctgygtaagccctt

SEQ ID NO: 16164 - DNA, 21 bp, Homo sapiens
aggagcatgtktttctatgag

SEQ ID NO: 16165 - DNA, 21 bp, Homo sapiens
cgtcttaagtytgagcatgct

SEQ ID NO: 16166 - DNA, 21 bp, Homo sapiens
ccaaaacagakttttggttgc

SEQ ID NO: 16167 - DNA, 21 bp, Homo sapiens
aacacatctgrtagcaatgta

SEQ ID NO: 16168 - DNA, 21 bp, Homo sapiens
tgaatgatagmttgttatatt

SEQ ID NO: 16169 - DNA, 21 bp, Homo sapiens
aagtgaagctrtaacagagta

SEQ ID NO: 16170 - DNA, 21 bp, Homo sapiens
aaaggctcaakatggtttagg

SEQ ID NO: 16171 - DNA, 21 bp, Homo sapiens
taaaacaaacraacccacaca

SEQ ID NO: 16172 - DNA, 21 bp, Homo sapiens
gatgatggaaygctgggaaac

SEQ ID NO: 16173 - DNA, 21 bp, Homo sapiens
gacccttctcrgtgctaccga

SEQ ID NO: 16174 - DNA, 21 bp, Homo sapiens
gggagtcagayatccctgagg

SEQ ID NO: 16175 - DNA, 21 bp, Homo sapiens
tgagtgaaagyaaacttggat

SEQ ID NO: 16176 - DNA, 21 bp, Homo sapiens
ggcctatcagrttttctttcc

SEQ ID NO: 16177 - DNA, 21 bp, Homo sapiens
gatatcttacyagcaagaggc

SEQ ID NO: 16178 - DNA, 21 bp, Homo sapiens
cctactggacrcctctaacgg

SEQ ID NO: 16179 - DNA, 21 bp, Homo sapiens
tgtttggaccygggactgact

SEQ ID NO: 16180 - DNA, 21 bp, Homo sapiens
cctgatcagtytttgcatgag

SEQ ID NO: 16181 - DNA, 21 bp, Homo sapiens
cagagtgattkaattagagct

SEQ ID NO: 16182 - DNA, 21 bp, Homo sapiens
aggatagactrtattttgtga

SEQ ID NO: 16183 - DNA, 21 bp, Homo sapiens
gagatggcttygaaagaccag

SEQ ID NO: 16184 - DNA, 21 bp, Homo sapiens
tacactaatgyaatgaagagt

SEQ ID NO: 16185 - DNA, 21 bp, Homo sapiens
tactgcccgaytgtatctgtg

SEQ ID NO: 16186 - DNA, 21 bp, Homo sapiens
agaacccataytcatacacaa

SEQ ID NO: 16187 - DNA, 21 bp, Homo sapiens
gcttacctacrgagacttcac

SEQ ID NO: 16188 - DNA, 21 bp, Homo sapiens
ggcagagcatygtgtacagaa

SEQ ID NO: 16189 - DNA, 21 bp, Homo sapiens
cttccaggcayttgtaaagaa

SEQ ID NO: 16190 - DNA, 21 bp, Homo sapiens
ttctgtcattkatggttgtgt

SEQ ID NO: 16191 - DNA, 21 bp, Homo sapiens
tccagtcaackgaaaggagcc

SEQ ID NO: 16192 - DNA, 21 bp, Homo sapiens
gaggacgcacrggcaactcaa

SEQ ID NO: 16193 - DNA, 21 bp, Homo sapiens
aaatatcagtyccccaggaag

SEQ ID NO: 16194 - DNA, 21 bp, Homo sapiens
agttttccctrccatgcagtc

SEQ ID NO: 16195 - DNA, 21 bp, Homo sapiens
agattgacacrttacctccag

SEQ ID NO: 16196 - DNA, 21 bp, Homo sapiens
tccattaaacrtgccatgaac

SEQ ID NO: 16197 - DNA, 21 bp, Homo sapiens
gaaacaatagkgaccaggtga

SEQ ID NO: 16198 - DNA, 21 bp, Homo sapiens
aaggaaataartgaacctggc

SEQ ID NO: 16199 - DNA, 21 bp, Homo sapiens
gctagatcgcrcaaagatttt

SEQ ID NO: 16200 - DNA, 21 bp, Homo sapiens
ttctacacacrtggaaaggca

SEQ ID NO: 16201 - DNA, 21 bp, Homo sapiens
atgtagaaacygtgggtagta

SEQ ID NO: 16202 - DNA, 21 bp, Homo sapiens
cgaaacaaatkccctttgaga

SEQ ID NO: 16203 - DNA, 21 bp, Homo sapiens
gctgtcttctrttctcttctc

SEQ ID NO: 16204 - DNA, 21 bp, Homo sapiens
ctattttttcrtaatagaaaa

SEQ ID NO: 16205 - DNA, 21 bp, Homo sapiens
aatcctttcayttgagtcgcc

SEQ ID NO: 16206 - DNA, 21 bp, Homo sapiens
tctgcaaaatraggaattttg

SEQ ID NO: 16207 - DNA, 21 bp, Homo sapiens
ttccaagaaaktgcctcaaca

SEQ ID NO: 16208 - DNA, 21 bp, Homo sapiens
atctattgtakaaagcaagga

SEQ ID NO: 16209 - DNA, 21 bp, Homo sapiens
cgttagttttytttatggttt

SEQ ID NO: 16210 - DNA, 21 bp, Homo sapiens
tgtgttcctgytactacattt

SEQ ID NO: 16211 - DNA, 21 bp, Homo sapiens
tctaagctacrtttacacaca

SEQ ID NO: 16212 - DNA, 21 bp, Homo sapiens
actcactcatrtacctgaggt

SEQ ID NO: 16213 - DNA, 21 bp, Homo sapiens
ggcaccagtgyctcaatttgc

SEQ ID NO: 16214 - DNA, 21 bp, Homo sapiens
ccggttacttmattaatgaga

SEQ ID NO: 16215 - DNA, 21 bp, Homo sapiens
atgctgtagarcaggctgaag

SEQ ID NO: 16216 - DNA, 21 bp, Homo sapiens
atgctctcctyaggaccaact

SEQ ID NO: 16217 - DNA, 21 bp, Homo sapiens
aagcagttcartgctggatta

SEQ ID NO: 16218 - DNA, 21 bp, Homo sapiens
aagtttgccarataaacagag

SEQ ID NO: 16219 - DNA, 21 bp, Homo sapiens
atatgttccarttcccaaaca

SEQ ID NO: 16220 - DNA, 21 bp, Homo sapiens
acataactaamctcgatattt

SEQ ID NO: 16221 - DNA, 21 bp, Homo sapiens
cctttaaaatrcaaattaatc

SEQ ID NO: 16222 - DNA, 21 bp, Homo sapiens
cttctccaccrtcttagccac

SEQ ID NO: 16223 - DNA, 21 bp, Homo sapiens
tttagcaattrtcaagtcatg

SEQ ID NO: 16224 - DNA, 21 bp, Homo sapiens
ttatcaataaktcagtgtatg

SEQ ID NO: 16225 - DNA, 21 bp, Homo sapiens
cttagttgcaygtgactgata

SEQ ID NO: 16226 - DNA, 21 bp, Homo sapiens
ttctcaggctrtaattccaga

SEQ ID NO: 16227 - DNA, 21 bp, Homo sapiens
gtaaccaatayaaaatctgaa

SEQ ID NO: 16228 - DNA, 21 bp, Homo sapiens
gtaatgagcayatcttttttg

SEQ ID NO: 16229 - DNA, 21 bp, Homo sapiens
tgctcttctaygtattaagag

SEQ ID NO: 16230 - DNA, 21 bp, Homo sapiens
atttttaacayggcatagaaa

SEQ ID NO: 16231 - DNA, 21 bp, Homo sapiens
agagggccccygaatatggac

SEQ ID NO: 16232 - DNA, 21 bp, Homo sapiens
cttcctaacamtaaaccacat

SEQ ID NO: 16233 - DNA, 21 bp, Homo sapiens
ctgctgtcccygtgtttgagg

SEQ ID NO: 16234 - DNA, 21 bp, Homo sapiens
attaaagacayatggtaacta

SEQ ID NO: 16235 - DNA, 21 bp, Homo sapiens
gtggtaagagytggaaaatat

SEQ ID NO: 16236 - DNA, 21 bp, Homo sapiens
gtaaatgaaayggtagccatt

SEQ ID NO: 16237 - DNA, 21 bp, Homo sapiens
tgatgtgtccrtgctggatgg

SEQ ID NO: 16238 - DNA, 21 bp, Homo sapiens
ctatgacgcayaagtacaagg

SEQ ID NO: 16239 - DNA, 21 bp, Homo sapiens
atctactatgrctctttgtta

SEQ ID NO: 16240 - DNA, 21 bp, Homo sapiens
tggtcccggargacaggagca

SEQ ID NO: 16241 - DNA, 21 bp, Homo sapiens
tgtgacccacrtgtgcagaca

SEQ ID NO: 16242 - DNA, 21 bp, Homo sapiens
aagaatgtccytgtgcttacc

SEQ ID NO: 16243 - DNA, 21 bp, Homo sapiens
tctgctgcttygctgtgtggc

SEQ ID NO: 16244 - DNA, 21 bp, Homo sapiens
ggtattattayggttttaatt

SEQ ID NO: 16245 - DNA, 21 bp, Homo sapiens
accttatatcrtcatccaagc

SEQ ID NO: 16246 - DNA, 21 bp, Homo sapiens
gccgagttagyggacgaattt

SEQ ID NO: 16247 - DNA, 21 bp, Homo sapiens
ggatttgcttyattttgcttt

SEQ ID NO: 16248 - DNA, 21 bp, Homo sapiens
tggtttaccaytctgcttcac

SEQ ID NO: 16249 - DNA, 21 bp, Homo sapiens
gcaagtcctcrgcagttgtgg

SEQ ID NO: 16250 - DNA, 21 bp, Homo sapiens
aattttccttyttgacctcct

SEQ ID NO: 16251 - DNA, 21 bp, Homo sapiens
gaacacaagcrtcccaagaaa

SEQ ID NO: 16252 - DNA, 21 bp, Homo sapiens
agctgtttgcrgatgcccttt

SEQ ID NO: 16253 - DNA, 21 bp, Homo sapiens
aaagcattcaytcaattattc

SEQ ID NO: 16254 - DNA, 21 bp, Homo sapiens
cagaaagtgcraaggaaaaag

SEQ ID NO: 16255 - DNA, 21 bp, Homo sapiens
atgaaaatttrtagtcagaga

SEQ ID NO: 16256 - DNA, 21 bp, Homo sapiens
gaacataaagmtagccaataa

SEQ ID NO: 16257 - DNA, 21 bp, Homo sapiens
tagctcattcrttagtgctca

SEQ ID NO: 16258 - DNA, 21 bp, Homo sapiens
ctgggttctcrtccctctttt

SEQ ID NO: 16259 - DNA, 21 bp, Homo sapiens
ttttttaaggrggccaactgt

SEQ ID NO: 16260 - DNA, 21 bp, Homo sapiens
tctttctttcrtagttttttt

SEQ ID NO: 16261 - DNA, 21 bp, Homo sapiens
aatactgtatragctctgaaa

SEQ ID NO: 16262 - DNA, 21 bp, Homo sapiens
tctccttctgytgctaacatt

SEQ ID NO: 16263 - DNA, 21 bp, Homo sapiens
gaaacctacarcctatcaaga

SEQ ID NO: 16264 - DNA, 21 bp, Homo sapiens
ccagtctttckgttatatgga

SEQ ID NO: 16265 - DNA, 21 bp, Homo sapiens
acatgagtcaygcagtcattt

SEQ ID NO: 16266 - DNA, 21 bp, Homo sapiens
cctctactccytccttgatat

SEQ ID NO: 16267 - DNA, 21 bp, Homo sapiens
atgatatcacyacacatctat

SEQ ID NO: 16268 - DNA, 21 bp, Homo sapiens
aaatataagcygtttaatgaa

SEQ ID NO: 16269 - DNA, 21 bp, Homo sapiens
aaagagtagcyagtcctcctg

SEQ ID NO: 16270 - DNA, 21 bp, Homo sapiens
ccacttttatycttctaaata

SEQ ID NO: 16271 - DNA, 21 bp, Homo sapiens
gattttctaamcatgaatatt

SEQ ID NO: 16272 - DNA, 21 bp, Homo sapiens
aataataaatrtaattctgtt

SEQ ID NO: 16273 - DNA, 21 bp, Homo sapiens
aattgcacaaytttccaatgg

SEQ ID NO: 16274 - DNA, 21 bp, Homo sapiens
aaagtcattgyaatttatgtt

SEQ ID NO: 16275 - DNA, 21 bp, Homo sapiens
tcacagagccyaacattacca

SEQ ID NO: 16276 - DNA, 21 bp, Homo sapiens
acgaatcacarggaaatatac

SEQ ID NO: 16277 - DNA, 21 bp, Homo sapiens
gctttgttgcygtttttggtt

SEQ ID NO: 16278 - DNA, 21 bp, Homo sapiens
cctttatactrtacatgactc

SEQ ID NO: 16279 - DNA, 21 bp, Homo sapiens
atgagacatakgtttgctctg

SEQ ID NO: 16280 - DNA, 21 bp, Homo sapiens
caagaatttcrgtgtggttaa

SEQ ID NO: 16281 - DNA, 21 bp, Homo sapiens
ggggcctggtrggagactatt

SEQ ID NO: 16282 - DNA, 21 bp, Homo sapiens
gataatgaacrcagtttctag

SEQ ID NO: 16283 - DNA, 21 bp, Homo sapiens
agttgcttagrttgggtcgtg

SEQ ID NO: 16284 - DNA, 21 bp, Homo sapiens
atgtcaaatarttttagaatt

SEQ ID NO: 16285 - DNA, 21 bp, Homo sapiens
aaaggggcaamattgctccaa

SEQ ID NO: 16286 - DNA, 21 bp, Homo sapiens
aacagagacamcaaaggcaaa

SEQ ID NO: 16287 - DNA, 21 bp, Homo sapiens
tattatcaacyacagactact

SEQ ID NO: 16288 - DNA, 21 bp, Homo sapiens
gaactactgcrgggtaatcag

SEQ ID NO: 16289 - DNA, 21 bp, Homo sapiens
ctatcacacaygggaaaattg

SEQ ID NO: 16290 - DNA, 21 bp, Homo sapiens
aaaggtaaagrtagtggggga

SEQ ID NO: 16291 - DNA, 21 bp, Homo sapiens
ctcctgaactrtattgcaggc

SEQ ID NO: 16292 - DNA, 21 bp, Homo sapiens
tggcctacacygaggaatttg

SEQ ID NO: 16293 - DNA, 21 bp, Homo sapiens
ggttaccatcyttcctactgc

SEQ ID NO: 16294 - DNA, 21 bp, Homo sapiens
tctgggttgcmagctccatgt

SEQ ID NO: 16295 - DNA, 21 bp, Homo sapiens
tcccaaagatraacataactc

SEQ ID NO: 16296 - DNA, 21 bp, Homo sapiens
ataacaaatgytcctaatgct

SEQ ID NO: 16297 - DNA, 21 bp, Homo sapiens
aggatattccmttgagtacaa

SEQ ID NO: 16298 - DNA, 21 bp, Homo sapiens
tccagcccagmggttaggtgg

SEQ ID NO: 16299 - DNA, 21 bp, Homo sapiens
ataatattctrtagagacaca

SEQ ID NO: 16300 - DNA, 21 bp, Homo sapiens
gtaaataggcraaatagagtt

SEQ ID NO: 16301 - DNA, 21 bp, Homo sapiens
ttcagtctaamtgggttatac

SEQ ID NO: 16302 - DNA, 21 bp, Homo sapiens
tatatttttcyagtccaaact

SEQ ID NO: 16303 - DNA, 21 bp, Homo sapiens
aattatagatrggacacacca

SEQ ID NO: 16304 - DNA, 21 bp, Homo sapiens
caagtttcttyctctgtagac

SEQ ID NO: 16305 - DNA, 21 bp, Homo sapiens
atgccaccacrtcagaggaga

SEQ ID NO: 16306 - DNA, 21 bp, Homo sapiens
ataattatgcragatgaatta

SEQ ID NO: 16307 - DNA, 21 bp, Homo sapiens
aggttttggtygggacagatc

SEQ ID NO: 16308 - DNA, 21 bp, Homo sapiens
taatgctgaamtgggaaccag

SEQ ID NO: 16309 - DNA, 21 bp, Homo sapiens
gtcccacctakttttgctttt

SEQ ID NO: 16310 - DNA, 21 bp, Homo sapiens
agagaaagaakaaacattttc

SEQ ID NO: 16311 - DNA, 21 bp, Homo sapiens
atttgccagakattctcccca

SEQ ID NO: 16312 - DNA, 21 bp, Homo sapiens
tcccaggagcrgcagcattat

SEQ ID NO: 16313 - DNA, 21 bp, Homo sapiens
tggttataaaytgtcaactga

SEQ ID NO: 16314 - DNA, 21 bp, Homo sapiens
taaaactgcarttctcgtgac

SEQ ID NO: 16315 - DNA, 21 bp, Homo sapiens
cgtgtacacaraccattggca

SEQ ID NO: 16316 - DNA, 21 bp, Homo sapiens
ggctgggataktctctgtgcc

SEQ ID NO: 16317 - DNA, 21 bp, Homo sapiens
ccagggctcaytgttcacctt

SEQ ID NO: 16318 - DNA, 21 bp, Homo sapiens
caagtgatacrgcatttgcca

SEQ ID NO: 16319 - DNA, 21 bp, Homo sapiens
ttttctaaatmcggctgctta

SEQ ID NO: 16320 - DNA, 21 bp, Homo sapiens
ctgctgaagaktgagtgtttt

SEQ ID NO: 16321 - DNA, 21 bp, Homo sapiens
ttttaatgccrgaggtttacc

SEQ ID NO: 16322 - DNA, 21 bp, Homo sapiens
gcaaccacctraaagaagctt

SEQ ID NO: 16323 - DNA, 21 bp, Homo sapiens
ctcagcactayatattaaatc

SEQ ID NO: 16324 - DNA, 21 bp, Homo sapiens
cagcacagtayctggcacaaa

SEQ ID NO: 16325 - DNA, 21 bp, Homo sapiens
ctagtattaamaagagaatta

SEQ ID NO: 16326 - DNA, 21 bp, Homo sapiens
tttcacttggygtaatctttt

SEQ ID NO: 16327 - DNA, 21 bp, Homo sapiens
ggaacacatcycccttgaatc

SEQ ID NO: 16328 - DNA, 21 bp, Homo sapiens
aacaaattctkcctatcccct

SEQ ID NO: 16329 - DNA, 21 bp, Homo sapiens
tgcagctttaytccattgtga

SEQ ID NO: 16330 - DNA, 21 bp, Homo sapiens
gaatggtggartgtttgtatc

SEQ ID NO: 16331 - DNA, 21 bp, Homo sapiens
ctagcattgaygttgagagtt

SEQ ID NO: 16332 - DNA, 21 bp, Homo sapiens
actatgtgcaytgtttttatc

SEQ ID NO: 16333 - DNA, 21 bp, Homo sapiens
ttcgcctaggrgttcaagaca

SEQ ID NO: 16334 - DNA, 21 bp, Homo sapiens
ttgcgggggtkgggggtggtc

SEQ ID NO: 16335 - DNA, 21 bp, Homo sapiens
aaggaagctgygaaatgtgtt

SEQ ID NO: 16336 - DNA, 21 bp, Homo sapiens
tggtggcataygcctgtggtc

SEQ ID NO: 16337 - DNA, 21 bp, Homo sapiens
ttttatgggaygtcataaaac

SEQ ID NO: 16338 - DNA, 21 bp, Homo sapiens
cacacggaccrataaacaaag

SEQ ID NO: 16339 - DNA, 21 bp, Homo sapiens
ccctgtgagtrtgctataatg

SEQ ID NO: 16340 - DNA, 21 bp, Homo sapiens
caggaggatcrggtagaataa

SEQ ID NO: 16341 - DNA, 21 bp, Homo sapiens
cacaagacagrtatttgtgcc

SEQ ID NO: 16342 - DNA, 21 bp, Homo sapiens
aacacccttcktagaacattg

SEQ ID NO: 16343 - DNA, 21 bp, Homo sapiens
actgagccccraggcctggcc

SEQ ID NO: 16344 - DNA, 21 bp, Homo sapiens
gcctcgaatcygtttcagagt

SEQ ID NO: 16345 - DNA, 21 bp, Homo sapiens
aaaatacccaygcctggccca

SEQ ID NO: 16346 - DNA, 21 bp, Homo sapiens
taaagttagamagttctgtag

SEQ ID NO: 16347 - DNA, 21 bp, Homo sapiens
caaggaatagyggcccctgct

SEQ ID NO: 16348 - DNA, 21 bp, Homo sapiens
ggtgcctcctrgaagctggct

SEQ ID NO: 16349 - DNA, 21 bp, Homo sapiens
ctctctgactycgcagccaag

SEQ ID NO: 16350 - DNA, 21 bp, Homo sapiens
agaaatgtgarcacagaggcc

SEQ ID NO: 16351 - DNA, 21 bp, Homo sapiens
cagatggtcarcaacttcata

SEQ ID NO: 16352 - DNA, 21 bp, Homo sapiens
tccacctgcartaaagcagaa

SEQ ID NO: 16353 - DNA, 21 bp, Homo sapiens
acagcttcccyatttatcagc

SEQ ID NO: 16354 - DNA, 21 bp, Homo sapiens
ctgactccacygtagggaaga

SEQ ID NO: 16355 - DNA, 21 bp, Homo sapiens
gagaccatggygcaataatcg

SEQ ID NO: 16356 - DNA, 21 bp, Homo sapiens
cagactcacargagaaaagca

SEQ ID NO: 16357 - DNA, 21 bp, Homo sapiens
tttgctccccrctgtgcttcc

SEQ ID NO: 16358 - DNA, 21 bp, Homo sapiens
atccccgtgcyacaggctgag

SEQ ID NO: 16359 - DNA, 21 bp, Homo sapiens
catttctgccmagacaatctg

SEQ ID NO: 16360 - DNA, 21 bp, Homo sapiens
tttattacacrttcggtgaac

SEQ ID NO: 16361 - DNA, 21 bp, Homo sapiens
gcctgccaccrtggctgcgag

SEQ ID NO: 16362 - DNA, 21 bp, Homo sapiens
tctctgtttcrttcagtcctt

SEQ ID NO: 16363 - DNA, 21 bp, Homo sapiens
aggctgataamatcctgcgga

SEQ ID NO: 16364 - DNA, 21 bp, Homo sapiens
gaaattgcaamtataattgaa

SEQ ID NO: 16365 - DNA, 21 bp, Homo sapiens
aaattatacgyccgtgcagtc

SEQ ID NO: 16366 - DNA, 21 bp, Homo sapiens
caaagaaatayggggaattgc

SEQ ID NO: 16367 - DNA, 21 bp, Homo sapiens
tacttcctaayctcaagggac

SEQ ID NO: 16368 - DNA, 21 bp, Homo sapiens
aaggcttcttkaactaggacc

SEQ ID NO: 16369 - DNA, 21 bp, Homo sapiens
aaatttgctakttaagcaggt

SEQ ID NO: 16370 - DNA, 21 bp, Homo sapiens
aataagaaagytggaggatct

SEQ ID NO: 16371 - DNA, 21 bp, Homo sapiens
atttttcagtkttgtgatggg

SEQ ID NO: 16372 - DNA, 21 bp, Homo sapiens
ttccaaggacrgatggagtca

SEQ ID NO: 16373 - DNA, 21 bp, Homo sapiens
aagtggaactkgggcccgcag

SEQ ID NO: 16374 - DNA, 21 bp, Homo sapiens
ggccctgttgytcaactcagt

SEQ ID NO: 16375 - DNA, 21 bp, Homo sapiens
gacacagaackacacacatac

SEQ ID NO: 16376 - DNA, 21 bp, Homo sapiens
agaagcttcaygccctggtct

SEQ ID NO: 16377 - DNA, 21 bp, Homo sapiens
ttcagcctgcrtgccaattcc

SEQ ID NO: 16378 - DNA, 21 bp, Homo sapiens
ctgaagaaaaragtttagggt

SEQ ID NO: 16379 - DNA, 21 bp, Homo sapiens
gctggtgggcmggtgagttgg

SEQ ID NO: 16380 - DNA, 21 bp, Homo sapiens
aggattcttgktgcagtcggc

SEQ ID NO: 16381 - DNA, 21 bp, Homo sapiens
cacaaatgacmgctgtctttt

SEQ ID NO: 16382 - DNA, 21 bp, Homo sapiens
gccctttgttytacccagttt

SEQ ID NO: 16383 - DNA, 21 bp, Homo sapiens
ctctgagaatyggaggttgtt

SEQ ID NO: 16384 - DNA, 21 bp, Homo sapiens
gaaggcactgyggaattggga

SEQ ID NO: 16385 - DNA, 21 bp, Homo sapiens
acacacgctgrctgcttctct

SEQ ID NO: 16386 - DNA, 21 bp, Homo sapiens
ctgggctctgyagggatacta

SEQ ID NO: 16387 - DNA, 21 bp, Homo sapiens
gcatgagattycggagcacct

SEQ ID NO: 16388 - DNA, 21 bp, Homo sapiens
aacatctcagmcctctgacca

SEQ ID NO: 16389 - DNA, 21 bp, Homo sapiens
ctacagcgggrtattgcagag

SEQ ID NO: 16390 - DNA, 21 bp, Homo sapiens
ccagccccagyctctcccaac

SEQ ID NO: 16391 - DNA, 21 bp, Homo sapiens
tagaatctaayaagaaaaacg

SEQ ID NO: 16392 - DNA, 21 bp, Homo sapiens
ccagaaggacraggaaagggc

SEQ ID NO: 16393 - DNA, 21 bp, Homo sapiens
tcaaacaataktaatttcaca

SEQ ID NO: 16394 - DNA, 21 bp, Homo sapiens
gtctttctcaygaaagagcta

SEQ ID NO: 16395 - DNA, 21 bp, Homo sapiens
agccgagcccrgagagaaggc

SEQ ID NO: 16396 - DNA, 21 bp, Homo sapiens
agcagcctgaraccgtcaggg

SEQ ID NO: 16397 - DNA, 21 bp, Homo sapiens
gtcccagggcrtgtgccgctc

SEQ ID NO: 16398 - DNA, 21 bp, Homo sapiens
gggagaaaccyggtccactgg

SEQ ID NO: 16399 - DNA, 21 bp, Homo sapiens
gtgggagagcrtgctgtatat

SEQ ID NO: 16400 - DNA, 21 bp, Homo sapiens
cccgatggctygtctgccatg

SEQ ID NO: 16401 - DNA, 21 bp, Homo sapiens
acctacttaamtgaaacgtcc

SEQ ID NO: 16402 - DNA, 21 bp, Homo sapiens
tgggagaccgygagtattctc

SEQ ID NO: 16403 - DNA, 21 bp, Homo sapiens
cttcagccatrcttttagttt

SEQ ID NO: 16404 - DNA, 21 bp, Homo sapiens
cttctggcctycctcccttgg

SEQ ID NO: 16405 - DNA, 21 bp, Homo sapiens
cctgtcataayggagaaatta

SEQ ID NO: 16406 - DNA, 21 bp, Homo sapiens
gtgcatggctrcataattaaa

SEQ ID NO: 16407 - DNA, 21 bp, Homo sapiens
aagctgaggtkgtggttgtgt

SEQ ID NO: 16408 - DNA, 21 bp, Homo sapiens
cacacccaatrctgcaaacat

SEQ ID NO: 16409 - DNA, 21 bp, Homo sapiens
gtatgttataytggtaatcat

SEQ ID NO: 16410 - DNA, 21 bp, Homo sapiens
ggaagtgacarctcaggcttg

SEQ ID NO: 16411 - DNA, 21 bp, Homo sapiens
gtatctccgtraagtaacaca

SEQ ID NO: 16412 - DNA, 21 bp, Homo sapiens
tttatatggartgaaacatgt

SEQ ID NO: 16413 - DNA, 21 bp, Homo sapiens
caatattagtrttggttgtga

SEQ ID NO: 16414 - DNA, 21 bp, Homo sapiens
tataaactgcyggtagaatat

SEQ ID NO: 16415 - DNA, 21 bp, Homo sapiens
cgtctctgtaygctgcatctc

SEQ ID NO: 16416 - DNA, 21 bp, Homo sapiens
ctgttttatgytttgccaaat

SEQ ID NO: 16417 - DNA, 21 bp, Homo sapiens
tggattgaccrtttgatgtgg

SEQ ID NO: 16418 - DNA, 21 bp, Homo sapiens
aaggctacatrgacagggtgg

SEQ ID NO: 16419 - DNA, 21 bp, Homo sapiens
gtctgaacgcygtctgctgaa

SEQ ID NO: 16420 - DNA, 21 bp, Homo sapiens
agacctaagtyggtgggggcg

SEQ ID NO: 16421 - DNA, 21 bp, Homo sapiens
gaggccaggcrtggggagagg

SEQ ID NO: 16422 - DNA, 21 bp, Homo sapiens
ttgaaataatyacactgcctt

SEQ ID NO: 16423 - DNA, 21 bp, Homo sapiens
actgcactggyggcattagct

SEQ ID NO: 16424 - DNA, 21 bp, Homo sapiens
aaggttagcaytgaaagccaa

SEQ ID NO: 16425 - DNA, 21 bp, Homo sapiens
ggccctgaaayagaatatgca

SEQ ID NO: 16426 - DNA, 21 bp, Homo sapiens
aaataacattyaaacatcccc

SEQ ID NO: 16427 - DNA, 21 bp, Homo sapiens
gagattggcayaaagcaccag

SEQ ID NO: 16428 - DNA, 21 bp, Homo sapiens
ttatgaaaatrgtttcaacct

SEQ ID NO: 16429 - DNA, 21 bp, Homo sapiens
tctccagaggygacactgcta

SEQ ID NO: 16430 - DNA, 21 bp, Homo sapiens
gttcagttttrgctgaactgc

SEQ ID NO: 16431 - DNA, 21 bp, Homo sapiens
ttccctccctyaaagtgaact

SEQ ID NO: 16432 - DNA, 21 bp, Homo sapiens
ccatgcccatmgcacactctg

SEQ ID NO: 16433 - DNA, 21 bp, Homo sapiens
gtgtttcccaragtaaactga

SEQ ID NO: 16434 - DNA, 21 bp, Homo sapiens
tcgacagcatrctaacatagc

SEQ ID NO: 16435 - DNA, 21 bp, Homo sapiens
tgtttaatatktggtagtact

SEQ ID NO: 16436 - DNA, 21 bp, Homo sapiens
ttaaggacaaygcaaaacgtt

SEQ ID NO: 16437 - DNA, 21 bp, Homo sapiens
cagaaatgggygccgtctatg

SEQ ID NO: 16438 - DNA, 21 bp, Homo sapiens
cagatgtgatyaatggctgca

SEQ ID NO: 16439 - DNA, 21 bp, Homo sapiens
accccatggtrttcctctaaa

SEQ ID NO: 16440 - DNA, 21 bp, Homo sapiens
gcatgctgcaycggcttgttg

SEQ ID NO: 16441 - DNA, 21 bp, Homo sapiens
gtaaaatgtgytgattgctgg

SEQ ID NO: 16442 - DNA, 21 bp, Homo sapiens
ctgggcgtggrctgcaggggg

SEQ ID NO: 16443 - DNA, 21 bp, Homo sapiens
ttttaatattytgcatctaat

SEQ ID NO: 16444 - DNA, 21 bp, Homo sapiens
ccattgctagrtttcttgatt

SEQ ID NO: 16445 - DNA, 21 bp, Homo sapiens
cacagtatatyttccaccagc

SEQ ID NO: 16446 - DNA, 21 bp, Homo sapiens
ctatttttacygttggacact

SEQ ID NO: 16447 - DNA, 21 bp, Homo sapiens
cgactttcctyttgtaaatta

SEQ ID NO: 16448 - DNA, 21 bp, Homo sapiens
ggatggtgtcrggctcattat

SEQ ID NO: 16449 - DNA, 21 bp, Homo sapiens
atggttagcaygccagtgaga

SEQ ID NO: 16450 - DNA, 21 bp, Homo sapiens
cctagtgtggygaaagttacc

SEQ ID NO: 16451 - DNA, 21 bp, Homo sapiens
ctatgcctacmcaaatacaca

SEQ ID NO: 16452 - DNA, 21 bp, Homo sapiens
ggaaggaactrgcacaaacaa

SEQ ID NO: 16453 - DNA, 21 bp, Homo sapiens
tgaggggctcraggacaagtt

SEQ ID NO: 16454 - DNA, 21 bp, Homo sapiens
ctattttcctrgcccagagtt

SEQ ID NO: 16455 - DNA, 21 bp, Homo sapiens
tgaaaggcaakccctccagag

SEQ ID NO: 16456 - DNA, 21 bp, Homo sapiens
tgatgggatgrtctgtcacat

SEQ ID NO: 16457 - DNA, 21 bp, Homo sapiens
gtgctcctgtrtacgtcagat

SEQ ID NO: 16458 - DNA, 21 bp, Homo sapiens
gccttagttgyataacctgta

SEQ ID NO: 16459 - DNA, 21 bp, Homo sapiens
tttctaaattrtttctgagtt

SEQ ID NO: 16460 - DNA, 21 bp, Homo sapiens
tgtgccaatgytgaaggtatg

SEQ ID NO: 16461 - DNA, 21 bp, Homo sapiens
tctcaagtggygtctacttgg

SEQ ID NO: 16462 - DNA, 21 bp, Homo sapiens
aaacatgtggyctgtaaacaa

SEQ ID NO: 16463 - DNA, 21 bp, Homo sapiens
actaaacagcrttgtgatgta

SEQ ID NO: 16464 - DNA, 21 bp, Homo sapiens
ttcagcttaaraaaacatttt

SEQ ID NO: 16465 - DNA, 21 bp, Homo sapiens
gtaacaaccayttaatcagtg

SEQ ID NO: 16466 - DNA, 21 bp, Homo sapiens
tacctcaaccraactttggaa

SEQ ID NO: 16467 - DNA, 21 bp, Homo sapiens
acatagataaragattcgttt

SEQ ID NO: 16468 - DNA, 21 bp, Homo sapiens
cttttaggctytgtgggcctt

SEQ ID NO: 16469 - DNA, 21 bp, Homo sapiens
gttttgatcaytgataggtct

SEQ ID NO: 16470 - DNA, 21 bp, Homo sapiens
ggaataagggmaagagaggag

SEQ ID NO: 16471 - DNA, 21 bp, Homo sapiens
gcaaaagagaytgggaagttc

SEQ ID NO: 16472 - DNA, 21 bp, Homo sapiens
aagttattgakgaaaatcatt

SEQ ID NO: 16473 - DNA, 21 bp, Homo sapiens
accttcggtarcaaggtaaga

SEQ ID NO: 16474 - DNA, 21 bp, Homo sapiens
agggtttcgcrttatttattc

SEQ ID NO: 16475 - DNA, 21 bp, Homo sapiens
tttttctgagrccaggttttt

SEQ ID NO: 16476 - DNA, 21 bp, Homo sapiens
ggggtctgagytcagccatct

SEQ ID NO: 16477 - DNA, 21 bp, Homo sapiens
gcatgtgtcaragctattcta

SEQ ID NO: 16478 - DNA, 21 bp, Homo sapiens
ctgtcacttayaggactgtac

SEQ ID NO: 16479 - DNA, 21 bp, Homo sapiens
aagcagagaaktgctctgtaa

SEQ ID NO: 16480 - DNA, 21 bp, Homo sapiens
caaaaacgggrgtgaggagca

SEQ ID NO: 16481 - DNA, 21 bp, Homo sapiens
ttctcatctgragcctgactg

SEQ ID NO: 16482 - DNA, 21 bp, Homo sapiens
tggtatcacayactaggagga

SEQ ID NO: 16483 - DNA, 21 bp, Homo sapiens
tgtgagtactrttgtatattc

SEQ ID NO: 16484 - DNA, 21 bp, Homo sapiens
tcaattagcayccttttattt

SEQ ID NO: 16485 - DNA, 21 bp, Homo sapiens
ttagtctaccrtctcacagac

SEQ ID NO: 16486 - DNA, 21 bp, Homo sapiens
gttatgagcaytccatgtttt

SEQ ID NO: 16487 - DNA, 21 bp, Homo sapiens
tgctcactaamtatttgtcgt

SEQ ID NO: 16488 - DNA, 21 bp, Homo sapiens
gtatgctctcrgaaaatatat

SEQ ID NO: 16489 - DNA, 21 bp, Homo sapiens
tgccaagctgygggtctgtgg

SEQ ID NO: 16490 - DNA, 21 bp, Homo sapiens
atttgcagtarcatttcaaag

SEQ ID NO: 16491 - DNA, 21 bp, Homo sapiens
ctgtctgcgtrctgtcatgcc

SEQ ID NO: 16492 - DNA, 21 bp, Homo sapiens
agaaagtattrtattccctga

SEQ ID NO: 16493 - DNA, 21 bp, Homo sapiens
ggtgaacttarttcattcaga

SEQ ID NO: 16494 - DNA, 21 bp, Homo sapiens
aactaattttyttaggagcaa

SEQ ID NO: 16495 - DNA, 21 bp, Homo sapiens
ctattctttarcatctagctc

SEQ ID NO: 16496 - DNA, 21 bp, Homo sapiens
gaggagttagygggttctatg

SEQ ID NO: 16497 - DNA, 21 bp, Homo sapiens
taacaaactcracagaaccca

SEQ ID NO: 16498 - DNA, 21 bp, Homo sapiens
tagtcttctartactcagatg

SEQ ID NO: 16499 - DNA, 21 bp, Homo sapiens
aaagaaagatkgtgtggaccc

SEQ ID NO: 16500 - DNA, 21 bp, Homo sapiens
atagtatagcraggcccttca

SEQ ID NO: 16501 - DNA, 21 bp, Homo sapiens
cgggaggtgargcgggaggtt

SEQ ID NO: 16502 - DNA, 21 bp, Homo sapiens
agaggtggaamaagagaaggt

SEQ ID NO: 16503 - DNA, 21 bp, Homo sapiens
aggctaggagmgaataatcat

SEQ ID NO: 16504 - DNA, 21 bp, Homo sapiens
gccggcttccygtctgacttt

SEQ ID NO: 16505 - DNA, 21 bp, Homo sapiens
caaactctgtrtgtggaaatg

SEQ ID NO: 16506 - DNA, 21 bp, Homo sapiens
aaaacagagaragccctggga

SEQ ID NO: 16507 - DNA, 21 bp, Homo sapiens
aacagtcagcyggggtgacag

SEQ ID NO: 16508 - DNA, 21 bp, Homo sapiens
ggagaagagcrgtgaggagga

SEQ ID NO: 16509 - DNA, 21 bp, Homo sapiens
tggaaacttayagtttagtgc

SEQ ID NO: 16510 - DNA, 21 bp, Homo sapiens
agatatggaamaatgagaggc

SEQ ID NO: 16511 - DNA, 21 bp, Homo sapiens
ccacacccatkaccaccacaa

SEQ ID NO: 16512 - DNA, 21 bp, Homo sapiens
ctggaaggaayaggtgatggg

SEQ ID NO: 16513 - DNA, 21 bp, Homo sapiens
gttagggacaycttcctgaag

SEQ ID NO: 16514 - DNA, 21 bp, Homo sapiens
gggtgaaatgygttgagtgta

SEQ ID NO: 16515 - DNA, 21 bp, Homo sapiens
ctgggatttartgctcttctt

SEQ ID NO: 16516 - DNA, 21 bp, Homo sapiens
aggagacttgytggtctctct

SEQ ID NO: 16517 - DNA, 21 bp, Homo sapiens
agcaagggaaratttggggat

SEQ ID NO: 16518 - DNA, 21 bp, Homo sapiens
ttgccaggttyccagtctcta

SEQ ID NO: 16519 - DNA, 21 bp, Homo sapiens
gaggaggaccmcagctgcccc

SEQ ID NO: 16520 - DNA, 21 bp, Homo sapiens
ttgaattactrttttaagcca

SEQ ID NO: 16521 - DNA, 21 bp, Homo sapiens
agaggttgccrtctagccttc

SEQ ID NO: 16522 - DNA, 21 bp, Homo sapiens
gagaaattgcrtgagctaaat

SEQ ID NO: 16523 - DNA, 21 bp, Homo sapiens
gagctgcaggrctttgtaaat

SEQ ID NO: 16524 - DNA, 21 bp, Homo sapiens
tgataagtagmaatgggatct

SEQ ID NO: 16525 - DNA, 21 bp, Homo sapiens
ttcttcctctytccaaagtat

SEQ ID NO: 16526 - DNA, 21 bp, Homo sapiens
ttccaaggtcygggagaggat

SEQ ID NO: 16527 - DNA, 21 bp, Homo sapiens
aagttgtaaayccaggagagc

SEQ ID NO: 16528 - DNA, 21 bp, Homo sapiens
gaatattcacmatttgatcca

SEQ ID NO: 16529 - DNA, 21 bp, Homo sapiens
agggtttggaracctttattg

SEQ ID NO: 16530 - DNA, 21 bp, Homo sapiens
aaaaatgagcrgatgtttagt

SEQ ID NO: 16531 - DNA, 21 bp, Homo sapiens
aaatgcatacrtttgtgattt

SEQ ID NO: 16532 - DNA, 21 bp, Homo sapiens
tttctgctacrttttgattga

SEQ ID NO: 16533 - DNA, 21 bp, Homo sapiens
atgagcttagyatcagcaaac

SEQ ID NO: 16534 - DNA, 21 bp, Homo sapiens
gaatagtgaartgcgtttttg

SEQ ID NO: 16535 - DNA, 21 bp, Homo sapiens
atgtgcaaaayatattccatg

SEQ ID NO: 16536 - DNA, 21 bp, Homo sapiens
aagtagagctrgaatgcagac

SEQ ID NO: 16537 - DNA, 21 bp, Homo sapiens
atggaatccaygtgaaacttt

SEQ ID NO: 16538 - DNA, 21 bp, Homo sapiens
gagtgcagctrtgggaagcca

SEQ ID NO: 16539 - DNA, 21 bp, Homo sapiens
catacctgcayggctagcacc

SEQ ID NO: 16540 - DNA, 21 bp, Homo sapiens
ctcaaggcacraacagcttcc

SEQ ID NO: 16541 - DNA, 21 bp, Homo sapiens
ccaaatagtcrtatgaaaatt

SEQ ID NO: 16542 - DNA, 21 bp, Homo sapiens
gtgttgttctraagactgtag

SEQ ID NO: 16543 - DNA, 21 bp, Homo sapiens
ctgctcctgcrggtgataaga

SEQ ID NO: 16544 - DNA, 21 bp, Homo sapiens
gctcttctgcyttccatcatg

SEQ ID NO: 16545 - DNA, 21 bp, Homo sapiens
tctcatgaccyccgtaagact

SEQ ID NO: 16546 - DNA, 21 bp, Homo sapiens
atctgccatgyctgctttagg

SEQ ID NO: 16547 - DNA, 21 bp, Homo sapiens
aaactttgaartgttattatt

SEQ ID NO: 16548 - DNA, 21 bp, Homo sapiens
aaacaaatccytttgtcatcc

SEQ ID NO: 16549 - DNA, 21 bp, Homo sapiens
cacctcaggtycttcatgaaa

SEQ ID NO: 16550 - DNA, 21 bp, Homo sapiens
gacaaaattaytgcaaactct

SEQ ID NO: 16551 - DNA, 21 bp, Homo sapiens
atgaaacttaktatacttgga

SEQ ID NO: 16552 - DNA, 21 bp, Homo sapiens
tgggtgatccrgagctctttg

SEQ ID NO: 16553 - DNA, 21 bp, Homo sapiens
tggtctggaarccagcagggg

SEQ ID NO: 16554 - DNA, 21 bp, Homo sapiens
atgagagctartcatagtcta

SEQ ID NO: 16555 - DNA, 21 bp, Homo sapiens
ctaatgttgaygaacatacat

SEQ ID NO: 16556 - DNA, 21 bp, Homo sapiens
aaacttcctcyatcatccaat

SEQ ID NO: 16557 - DNA, 21 bp, Homo sapiens
ttggaccaagrcttctcaatt

SEQ ID NO: 16558 - DNA, 21 bp, Homo sapiens
gatgcttacaygagtgtatac

SEQ ID NO: 16559 - DNA, 21 bp, Homo sapiens
tgcctgaacayaggctgaaag

SEQ ID NO: 16560 - DNA, 21 bp, Homo sapiens
cacaactaatmttgtttttag

SEQ ID NO: 16561 - DNA, 21 bp, Homo sapiens
tgctgcatgcrtctttatctg

SEQ ID NO: 16562 - DNA, 21 bp, Homo sapiens
aagaaagaagrcttatttatc

SEQ ID NO: 16563 - DNA, 21 bp, Homo sapiens
atttggtaaaragtctataaa

SEQ ID NO: 16564 - DNA, 21 bp, Homo sapiens
agtattacaakaaagcttgag

SEQ ID NO: 16565 - DNA, 21 bp, Homo sapiens
ttcccaaattmatatctctgg

SEQ ID NO: 16566 - DNA, 21 bp, Homo sapiens
gaaatgatatygctctgtttt

SEQ ID NO: 16567 - DNA, 21 bp, Homo sapiens
agggagtggamggtgaagggc

SEQ ID NO: 16568 - DNA, 21 bp, Homo sapiens
aagttcaagamaccaaagctc

SEQ ID NO: 16569 - DNA, 21 bp, Homo sapiens
agttattacamggaagtttga

SEQ ID NO: 16570 - DNA, 21 bp, Homo sapiens
tatccactatraaccagaggt

SEQ ID NO: 16571 - DNA, 21 bp, Homo sapiens
cactcacaacratatacttaa

SEQ ID NO: 16572 - DNA, 21 bp, Homo sapiens
gcttccccatrattagttttt

SEQ ID NO: 16573 - DNA, 21 bp, Homo sapiens
agtagctatcyaaaccagaag

SEQ ID NO: 16574 - DNA, 21 bp, Homo sapiens
tgacacccatrgggcataaag

SEQ ID NO: 16575 - DNA, 21 bp, Homo sapiens
aaccatttccycatggatatc

SEQ ID NO: 16576 - DNA, 21 bp, Homo sapiens
tgaacaatcaygagagtgact

SEQ ID NO: 16577 - DNA, 21 bp, Homo sapiens
aaaaatggcarttatgtttac

SEQ ID NO: 16578 - DNA, 21 bp, Homo sapiens
ttccatgtagrcatttattgc

SEQ ID NO: 16579 - DNA, 21 bp, Homo sapiens
ttaagtatttygcacagcctt

SEQ ID NO: 16580 - DNA, 21 bp, Homo sapiens
cttcatgcctyttttttttca

SEQ ID NO: 16581 - DNA, 21 bp, Homo sapiens
aagttaactcyatggggctaa

SEQ ID NO: 16582 - DNA, 21 bp, Homo sapiens
aggaatttgtkgaaaaatttt

SEQ ID NO: 16583 - DNA, 21 bp, Homo sapiens
gggagaatgaragaatggaaa

SEQ ID NO: 16584 - DNA, 21 bp, Homo sapiens
aaatcctggcrttggagacaa

SEQ ID NO: 16585 - DNA, 21 bp, Homo sapiens
gaaggttcatrgagaggctta

SEQ ID NO: 16586 - DNA, 21 bp, Homo sapiens
gcttggatgayttctggtaat

SEQ ID NO: 16587 - DNA, 21 bp, Homo sapiens
tgcagatggcrcaagctttct

SEQ ID NO: 16588 - DNA, 21 bp, Homo sapiens
agagccacttygctatttttc

SEQ ID NO: 16589 - DNA, 21 bp, Homo sapiens
tctattcattrtaattgagtc

SEQ ID NO: 16590 - DNA, 21 bp, Homo sapiens
ctgtgagttgrccagacagca

SEQ ID NO: 16591 - DNA, 21 bp, Homo sapiens
aggtgagtcayttttctttct

SEQ ID NO: 16592 - DNA, 21 bp, Homo sapiens
aaaaaagaggycaagggcata

SEQ ID NO: 16593 - DNA, 21 bp, Homo sapiens
gtttcatagaktctggcagca

SEQ ID NO: 16594 - DNA, 21 bp, Homo sapiens
gtttctaagtktaagaatagc

SEQ ID NO: 16595 - DNA, 21 bp, Homo sapiens
tctgtttatcyttccgctagt

SEQ ID NO: 16596 - DNA, 21 bp, Homo sapiens
ttaactggtgycctttaaaaa

SEQ ID NO: 16597 - DNA, 21 bp, Homo sapiens
tatcttccccrggttttgtgg

SEQ ID NO: 16598 - DNA, 21 bp, Homo sapiens
ggctataaatmaaacgaacac

SEQ ID NO: 16599 - DNA, 21 bp, Homo sapiens
tggtttggggrcttttgaagg

SEQ ID NO: 16600 - DNA, 21 bp, Homo sapiens
aggatatagaygaatattcat

SEQ ID NO: 16601 - DNA, 21 bp, Homo sapiens
ctggtactcarttaatattcc

SEQ ID NO: 16602 - DNA, 21 bp, Homo sapiens
tataaacaccrtatgttaact

SEQ ID NO: 16603 - DNA, 21 bp, Homo sapiens
agttaacccayattggttgta

SEQ ID NO: 16604 - DNA, 21 bp, Homo sapiens
tcctattcctyttctacttag

SEQ ID NO: 16605 - DNA, 21 bp, Homo sapiens
ctgagcccagktgattactca

SEQ ID NO: 16606 - DNA, 21 bp, Homo sapiens
atattcactgmactaataccc

SEQ ID NO: 16607 - DNA, 21 bp, Homo sapiens
agacattttcrtcttttttcc

SEQ ID NO: 16608 - DNA, 21 bp, Homo sapiens
aagggttaagrttagaattag

SEQ ID NO: 16609 - DNA, 21 bp, Homo sapiens
acaatccctgycttttgattg

SEQ ID NO: 16610 - DNA, 21 bp, Homo sapiens
ggcagctaccrtgtgactata

SEQ ID NO: 16611 - DNA, 21 bp, Homo sapiens
gcttctctttkgaacacagct

SEQ ID NO: 16612 - DNA, 21 bp, Homo sapiens
ttataaggcakactcattgcg

SEQ ID NO: 16613 - DNA, 21 bp, Homo sapiens
aatatcactgkattagacaga

SEQ ID NO: 16614 - DNA, 21 bp, Homo sapiens
aaaaatgaagycccatgacta

SEQ ID NO: 16615 - DNA, 21 bp, Homo sapiens
gcagtgaagakgtaagccaag

SEQ ID NO: 16616 - DNA, 21 bp, Homo sapiens
atcccactctyatttttcatc

SEQ ID NO: 16617 - DNA, 21 bp, Homo sapiens
agaagggatcrtgtggcattt

SEQ ID NO: 16618 - DNA, 21 bp, Homo sapiens
acatcagataytttgcctaaa

SEQ ID NO: 16619 - DNA, 21 bp, Homo sapiens
gatattgcccyctgggacaat

SEQ ID NO: 16620 - DNA, 21 bp, Homo sapiens
ggatgtttcamtaaccacact

SEQ ID NO: 16621 - DNA, 21 bp, Homo sapiens
ccttttaaaartctaggtgga

SEQ ID NO: 16622 - DNA, 21 bp, Homo sapiens
tgccaattatrccaggatgga

SEQ ID NO: 16623 - DNA, 21 bp, Homo sapiens
gtgggacatgyagtcaatgga

SEQ ID NO: 16624 - DNA, 21 bp, Homo sapiens
ataacatcacrgaggaaagtg

SEQ ID NO: 16625 - DNA, 21 bp, Homo sapiens
cgcaagcccakcctgatcaaa

SEQ ID NO: 16626 - DNA, 21 bp, Homo sapiens
cctatatctcrcttatggctt

SEQ ID NO: 16627 - DNA, 21 bp, Homo sapiens
tgataaacggraaagcaagat

SEQ ID NO: 16628 - DNA, 21 bp, Homo sapiens
taccaaagcargatatatctg

SEQ ID NO: 16629 - DNA, 21 bp, Homo sapiens
atagagtaagrgaaatttagg

SEQ ID NO: 16630 - DNA, 21 bp, Homo sapiens
aaaaaggagayaatctcaaat

SEQ ID NO: 16631 - DNA, 21 bp, Homo sapiens
tgcccaggccragacaaagtg

SEQ ID NO: 16632 - DNA, 21 bp, Homo sapiens
atgatttgcaygagtgaacca

SEQ ID NO: 16633 - DNA, 21 bp, Homo sapiens
tgtcagagggyagagaatcag

SEQ ID NO: 16634 - DNA, 21 bp, Homo sapiens
aagtgtgtacrgttcacaatt

SEQ ID NO: 16635 - DNA, 21 bp, Homo sapiens
ccctcattgtygaacacctgg

SEQ ID NO: 16636 - DNA, 21 bp, Homo sapiens
aagctgaatgkcatttcctgg

SEQ ID NO: 16637 - DNA, 21 bp, Homo sapiens
tctatgcaagmgccatctgaa

SEQ ID NO: 16638 - DNA, 21 bp, Homo sapiens
cactggagacyattcaagata

SEQ ID NO: 16639 - DNA, 21 bp, Homo sapiens
gattcctctcrgatagcccta

SEQ ID NO: 16640 - DNA, 21 bp, Homo sapiens
tgggttgtgtyccaaggatcc

SEQ ID NO: 16641 - DNA, 21 bp, Homo sapiens
tcatctaccaytgattaccac

SEQ ID NO: 16642 - DNA, 21 bp, Homo sapiens
atcttactccrtcagtatttg

SEQ ID NO: 16643 - DNA, 21 bp, Homo sapiens
gctatgaagayaatagtcaac

SEQ ID NO: 16644 - DNA, 21 bp, Homo sapiens
tatgtcagaarccctactata

SEQ ID NO: 16645 - DNA, 21 bp, Homo sapiens
gaggaagatgktctagcagag

SEQ ID NO: 16646 - DNA, 21 bp, Homo sapiens
tctccttgcaygtctctttta

SEQ ID NO: 16647 - DNA, 21 bp, Homo sapiens
tcttttctttyttcactataa

SEQ ID NO: 16648 - DNA, 21 bp, Homo sapiens
agattagaaartaagaggcca

SEQ ID NO: 16649 - DNA, 21 bp, Homo sapiens
gcaggctgaayatctccattc

SEQ ID NO: 16650 - DNA, 21 bp, Homo sapiens
gcttttgttayctgagcaatt

SEQ ID NO: 16651 - DNA, 21 bp, Homo sapiens
agtttccgtgkagtgatggag

SEQ ID NO: 16652 - DNA, 21 bp, Homo sapiens
gtcctgaatcmcaacgaattt

SEQ ID NO: 16653 - DNA, 21 bp, Homo sapiens
gaacacttctrtcgtgctttg

SEQ ID NO: 16654 - DNA, 21 bp, Homo sapiens
ctggttatatytaagacacca

SEQ ID NO: 16655 - DNA, 21 bp, Homo sapiens
tttgaagattycctttcattt

SEQ ID NO: 16656 - DNA, 21 bp, Homo sapiens
tcattaaccartgtttctccc

SEQ ID NO: 16657 - DNA, 21 bp, Homo sapiens
gcttccacgtytgtgtattta

SEQ ID NO: 16658 - DNA, 21 bp, Homo sapiens
agtattcaagrtcaagaacag

SEQ ID NO: 16659 - DNA, 21 bp, Homo sapiens
ttattcatgargtagcaaagt

SEQ ID NO: 16660 - DNA, 21 bp, Homo sapiens
tgtcaaatacrttgaggcagt

SEQ ID NO: 16661 - DNA, 21 bp, Homo sapiens
atccagtaggrccttgtactt

SEQ ID NO: 16662 - DNA, 21 bp, Homo sapiens
tatcaaaaacyatagctgata

SEQ ID NO: 16663 - DNA, 21 bp, Homo sapiens
aggaattataycatcagcttt

SEQ ID NO: 16664 - DNA, 21 bp, Homo sapiens
gcaagtagcarctctattcgt

SEQ ID NO: 16665 - DNA, 21 bp, Homo sapiens
tacagtttcargattttagag

SEQ ID NO: 16666 - DNA, 21 bp, Homo sapiens
cttttgtagayactttataat

SEQ ID NO: 16667 - DNA, 21 bp, Homo sapiens
atggattcaartgctatgcca

SEQ ID NO: 16668 - DNA, 21 bp, Homo sapiens
gcatctaatcygtcctggagt

SEQ ID NO: 16669 - DNA, 21 bp, Homo sapiens
cttttttcctkctttctctcc

SEQ ID NO: 16670 - DNA, 21 bp, Homo sapiens
gcttaatgttrggtcctgtca

SEQ ID NO: 16671 - DNA, 21 bp, Homo sapiens
gtggttttagygcaggacact

SEQ ID NO: 16672 - DNA, 21 bp, Homo sapiens
tgtgaccctgrctgatactca

SEQ ID NO: 16673 - DNA, 21 bp, Homo sapiens
gcttcccccartttgtgagaa

SEQ ID NO: 16674 - DNA, 21 bp, Homo sapiens
taccatgcatrgcagagcaag

SEQ ID NO: 16675 - DNA, 21 bp, Homo sapiens
tctttctgccrgaacgcacgg

SEQ ID NO: 16676 - DNA, 21 bp, Homo sapiens
acagtgtgctrttcctgaagt

SEQ ID NO: 16677 - DNA, 21 bp, Homo sapiens
agccaggttartgcccgtggt

SEQ ID NO: 16678 - DNA, 21 bp, Homo sapiens
atgattggackggatttaaca

SEQ ID NO: 16679 - DNA, 21 bp, Homo sapiens
ccagaattgartttttctggt

SEQ ID NO: 16680 - DNA, 21 bp, Homo sapiens
tcctacttacmcctatccact

SEQ ID NO: 16681 - DNA, 21 bp, Homo sapiens
gaaatagcaayttgaaaaaac

SEQ ID NO: 16682 - DNA, 21 bp, Homo sapiens
gaaaaacaaayactgtgggtc

SEQ ID NO: 16683 - DNA, 21 bp, Homo sapiens
aagagaactgyggggctgtca

SEQ ID NO: 16684 - DNA, 21 bp, Homo sapiens
ctgaaacacarcagacagcct

SEQ ID NO: 16685 - DNA, 21 bp, Homo sapiens
cacagtgtttrtcaagctcat

SEQ ID NO: 16686 - DNA, 21 bp, Homo sapiens
cttagctgcayggaattatga

SEQ ID NO: 16687 - DNA, 21 bp, Homo sapiens
ttgctgggctyggaggtggtg

SEQ ID NO: 16688 - DNA, 21 bp, Homo sapiens
tgcctgcagtygctctgtttc

SEQ ID NO: 16689 - DNA, 21 bp, Homo sapiens
tggaataacayatttaaagaa

SEQ ID NO: 16690 - DNA, 21 bp, Homo sapiens
ctcacaagtayggtctattga

SEQ ID NO: 16691 - DNA, 21 bp, Homo sapiens
tgttgctttcyataacctaat

SEQ ID NO: 16692 - DNA, 21 bp, Homo sapiens
ctgaagggctrtacaaatgca

SEQ ID NO: 16693 - DNA, 21 bp, Homo sapiens
ggacccagttyggcagctcgg

SEQ ID NO: 16694 - DNA, 21 bp, Homo sapiens
agggtggaacyccttgttgtt

SEQ ID NO: 16695 - DNA, 21 bp, Homo sapiens
attactgaaargttcaaatga

SEQ ID NO: 16696 - DNA, 21 bp, Homo sapiens
ttctgagcatrtatctatgta

SEQ ID NO: 16697 - DNA, 21 bp, Homo sapiens
agagctgtcartaggcaccta

SEQ ID NO: 16698 - DNA, 21 bp, Homo sapiens
tattccagatrattgcaaaat

SEQ ID NO: 16699 - DNA, 21 bp, Homo sapiens
tcttttttctycttcctatgg

SEQ ID NO: 16700 - DNA, 21 bp, Homo sapiens
ttgggttattyatgaaagtta

SEQ ID NO: 16701 - DNA, 21 bp, Homo sapiens
taattttcacrttagaccaat

SEQ ID NO: 16702 - DNA, 21 bp, Homo sapiens
gtttaggctayaaggaagtag

SEQ ID NO: 16703 - DNA, 21 bp, Homo sapiens
tccccacagtyaacattatgc

SEQ ID NO: 16704 - DNA, 21 bp, Homo sapiens
ttcaagtcctrttcattcccc

SEQ ID NO: 16705 - DNA, 21 bp, Homo sapiens
tgggggagccractctgggag

SEQ ID NO: 16706 - DNA, 21 bp, Homo sapiens
gaagcaatctygggactattt

SEQ ID NO: 16707 - DNA, 21 bp, Homo sapiens
ccctgtcctaktggtcgagga

SEQ ID NO: 16708 - DNA, 21 bp, Homo sapiens
acaagtacaargccaaatctg

SEQ ID NO: 16709 - DNA, 21 bp, Homo sapiens
gagggtaacaytcttaatttg

SEQ ID NO: 16710 - DNA, 21 bp, Homo sapiens
ggattattgcraaaaaaaaaa

SEQ ID NO: 16711 - DNA, 21 bp, Homo sapiens
agttattagarcacacaggtt

SEQ ID NO: 16712 - DNA, 21 bp, Homo sapiens
ttttcttgttytactctctat

SEQ ID NO: 16713 - DNA, 21 bp, Homo sapiens
acagcagtttycagtcttttc

SEQ ID NO: 16714 - DNA, 21 bp, Homo sapiens
tattatttgtyaagtattaaa

SEQ ID NO: 16715 - DNA, 21 bp, Homo sapiens
agtgtacgggkctgttatttt

SEQ ID NO: 16716 - DNA, 21 bp, Homo sapiens
aatctaaacayataagccctg

SEQ ID NO: 16717 - DNA, 21 bp, Homo sapiens
caggaaaggcrttgcagacat

SEQ ID NO: 16718 - DNA, 21 bp, Homo sapiens
gttttcaatayatcatcatta

SEQ ID NO: 16719 - DNA, 21 bp, Homo sapiens
atgtacatttyctcctgattc

SEQ ID NO: 16720 - DNA, 21 bp, Homo sapiens
cagtctgcatyttcaaagcat

SEQ ID NO: 16721 - DNA, 21 bp, Homo sapiens
aaattgtattygtttaaggaa

SEQ ID NO: 16722 - DNA, 21 bp, Homo sapiens
caacacatacytctaatcttt

SEQ ID NO: 16723 - DNA, 21 bp, Homo sapiens
ggttaaaggarggtcgtaaaa

SEQ ID NO: 16724 - DNA, 21 bp, Homo sapiens
ctgaagcactmggttttattc

SEQ ID NO: 16725 - DNA, 21 bp, Homo sapiens
aaagaaatatrcaaaatgcag

SEQ ID NO: 16726 - DNA, 21 bp, Homo sapiens
atgtacatgtratagacagga

SEQ ID NO: 16727 - DNA, 21 bp, Homo sapiens
acatattatgraagtagatta

SEQ ID NO: 16728 - DNA, 21 bp, Homo sapiens
ggattaagtcrtaaagaggat

SEQ ID NO: 16729 - DNA, 21 bp, Homo sapiens
cagttaaggtktccagagctc

SEQ ID NO: 16730 - DNA, 21 bp, Homo sapiens
cttgccatccygcatagcact

SEQ ID NO: 16731 - DNA, 21 bp, Homo sapiens
aaagttcctgraaacatttcc

SEQ ID NO: 16732 - DNA, 21 bp, Homo sapiens
tttagactttmggttctatgc

SEQ ID NO: 16733 - DNA, 21 bp, Homo sapiens
tatagagaatkatggccatgg

SEQ ID NO: 16734 - DNA, 21 bp, Homo sapiens
aggaacaggaktatatatctg

SEQ ID NO: 16735 - DNA, 21 bp, Homo sapiens
tcttgtggccrtaactatcac

SEQ ID NO: 16736 - DNA, 21 bp, Homo sapiens
atcatgggttrctgtgccaga

SEQ ID NO: 16737 - DNA, 21 bp, Homo sapiens
tttaggataaycaatggcatt

SEQ ID NO: 16738 - DNA, 21 bp, Homo sapiens
catttggttckttttaatatt

SEQ ID NO: 16739 - DNA, 21 bp, Homo sapiens
ctattgcttcrtctttgtttc

SEQ ID NO: 16740 - DNA, 21 bp, Homo sapiens
attccaactcyattagaatcc

SEQ ID NO: 16741 - DNA, 21 bp, Homo sapiens
aatttgaaatrtgtcatagat

SEQ ID NO: 16742 - DNA, 21 bp, Homo sapiens
gcatagtacaytgtagttccc

SEQ ID NO: 16743 - DNA, 21 bp, Homo sapiens
ggttcagaacrtaatttttag

SEQ ID NO: 16744 - DNA, 21 bp, Homo sapiens
aaaaatcttcygaatcttcta

SEQ ID NO: 16745 - DNA, 21 bp, Homo sapiens
aaaatagagakgagaaaaaaa

SEQ ID NO: 16746 - DNA, 21 bp, Homo sapiens
actgtattttrcaaagtgacc

SEQ ID NO: 16747 - DNA, 21 bp, Homo sapiens
tcaaggttacrtagtctgtta

SEQ ID NO: 16748 - DNA, 21 bp, Homo sapiens
gaaggagcacrgtagagaaca

SEQ ID NO: 16749 - DNA, 21 bp, Homo sapiens
catcaagcccrtaaaacgcca

SEQ ID NO: 16750 - DNA, 21 bp, Homo sapiens
cttagcaccayatcaacaatt

SEQ ID NO: 16751 - DNA, 21 bp, Homo sapiens
gtatttattgratgaataagt

SEQ ID NO: 16752 - DNA, 21 bp, Homo sapiens
ctacaggcacycttcttacat

SEQ ID NO: 16753 - DNA, 21 bp, Homo sapiens
ctgtaggaagmaagttttagt

SEQ ID NO: 16754 - DNA, 21 bp, Homo sapiens
cagaacacctyctgcagccac

SEQ ID NO: 16755 - DNA, 21 bp, Homo sapiens
cccatttataytcagatgatg

SEQ ID NO: 16756 - DNA, 21 bp, Homo sapiens
gaagcagcccrtaagctacaa

SEQ ID NO: 16757 - DNA, 21 bp, Homo sapiens
cttgggtttaytgtaccctac

SEQ ID NO: 16758 - DNA, 21 bp, Homo sapiens
aaattgacctrcagaagcaga

SEQ ID NO: 16759 - DNA, 21 bp, Homo sapiens
gatcaaaaatkatgttacttg

SEQ ID NO: 16760 - DNA, 21 bp, Homo sapiens
taacccacccyccttagtccc

SEQ ID NO: 16761 - DNA, 21 bp, Homo sapiens
ctttgcttccrttattctagt

SEQ ID NO: 16762 - DNA, 21 bp, Homo sapiens
tataggtcatyttggagtgtt

SEQ ID NO: 16763 - DNA, 21 bp, Homo sapiens
ttgcaccaagraacagagaag

SEQ ID NO: 16764 - DNA, 21 bp, Homo sapiens
tgttttcagtmcctcttctgg

SEQ ID NO: 16765 - DNA, 21 bp, Homo sapiens
gaagttatgcygtaaccaaga

SEQ ID NO: 16766 - DNA, 21 bp, Homo sapiens
accatctttcraagttttccc

SEQ ID NO: 16767 - DNA, 21 bp, Homo sapiens
tcaaaagcaamcatagctaaa

SEQ ID NO: 16768 - DNA, 21 bp, Homo sapiens
gtttctgctcytctctgcctc

SEQ ID NO: 16769 - DNA, 21 bp, Homo sapiens
atcgcttccaygctactgttg

SEQ ID NO: 16770 - DNA, 21 bp, Homo sapiens
gcaaggctcaytgtggtaaag

SEQ ID NO: 16771 - DNA, 21 bp, Homo sapiens
cctccaggtcrgccacgttcc

SEQ ID NO: 16772 - DNA, 21 bp, Homo sapiens
tacagtgcaarttgataaatg

SEQ ID NO: 16773 - DNA, 21 bp, Homo sapiens
aaattttaaargctgagaaaa

SEQ ID NO: 16774 - DNA, 21 bp, Homo sapiens
acttgaagaaygggtaaagtt

SEQ ID NO: 16775 - DNA, 21 bp, Homo sapiens
aaaagtgacaycagatgaccc

SEQ ID NO: 16776 - DNA, 21 bp, Homo sapiens
aagattcgaargcagcattcg

SEQ ID NO: 16777 - DNA, 21 bp, Homo sapiens
gggtttattaytgtgcctttc

SEQ ID NO: 16778 - DNA, 21 bp, Homo sapiens
ttcctctgttratgatagatt

SEQ ID NO: 16779 - DNA, 21 bp, Homo sapiens
tacaaaatctraaaggaaagg

SEQ ID NO: 16780 - DNA, 21 bp, Homo sapiens
aatattagtaygagtcttttt

SEQ ID NO: 16781 - DNA, 21 bp, Homo sapiens
agtgcaatccrttgagtggta

SEQ ID NO: 16782 - DNA, 21 bp, Homo sapiens
aatttctggaytagagcaaca

SEQ ID NO: 16783 - DNA, 21 bp, Homo sapiens
cctgaagagcmtcgaggtggt

SEQ ID NO: 16784 - DNA, 21 bp, Homo sapiens
agtcttttggrccctttaaat

SEQ ID NO: 16785 - DNA, 21 bp, Homo sapiens
ctcttagcccrtgatttttcc

SEQ ID NO: 16786 - DNA, 21 bp, Homo sapiens
ggaggcataargttcatacat

SEQ ID NO: 16787 - DNA, 21 bp, Homo sapiens
tagtgtggaarcatgacactc

SEQ ID NO: 16788 - DNA, 21 bp, Homo sapiens
gaaagtatgtrttgattgtac

SEQ ID NO: 16789 - DNA, 21 bp, Homo sapiens
tctgtagagtraatagtgaca

SEQ ID NO: 16790 - DNA, 21 bp, Homo sapiens
tttcaaacaargaaacagact

SEQ ID NO: 16791 - DNA, 21 bp, Homo sapiens
aggaatgaagyaagcagacaa

SEQ ID NO: 16792 - DNA, 21 bp, Homo sapiens
tagaactgtaragccttcctc

SEQ ID NO: 16793 - DNA, 21 bp, Homo sapiens
accaattatamtgctgttaaa

SEQ ID NO: 16794 - DNA, 21 bp, Homo sapiens
tttctattttragcatgttca

SEQ ID NO: 16795 - DNA, 21 bp, Homo sapiens
gtgacacaagrtagacttcag

SEQ ID NO: 16796 - DNA, 21 bp, Homo sapiens
atctctgatcrgtcctcagaa

SEQ ID NO: 16797 - DNA, 21 bp, Homo sapiens
taaactcataycacatttttc

SEQ ID NO: 16798 - DNA, 21 bp, Homo sapiens
aatagtaatamacaggggagt

SEQ ID NO: 16799 - DNA, 21 bp, Homo sapiens
gctcctgttaygaacattcct

SEQ ID NO: 16800 - DNA, 21 bp, Homo sapiens
tccagaatgcycttggctgag

SEQ ID NO: 16801 - DNA, 21 bp, Homo sapiens
ggtcagtgctyctcccatctt

SEQ ID NO: 16802 - DNA, 21 bp, Homo sapiens
aattttgacarcattaattca

SEQ ID NO: 16803 - DNA, 21 bp, Homo sapiens
cttccgttgcyctagtgcatt

SEQ ID NO: 16804 - DNA, 21 bp, Homo sapiens
taaagatgaaytttagcctct

SEQ ID NO: 16805 - DNA, 21 bp, Homo sapiens
cctatcactgytcttttccaa

SEQ ID NO: 16806 - DNA, 21 bp, Homo sapiens
catgaactgtyttagacaatc

SEQ ID NO: 16807 - DNA, 21 bp, Homo sapiens
ccatcacctcygacaagcagc

SEQ ID NO: 16808 - DNA, 21 bp, Homo sapiens
accttaacacygtggtctcaa

SEQ ID NO: 16809 - DNA, 21 bp, Homo sapiens
attaaaggccytcccctgtat

SEQ ID NO: 16810 - DNA, 21 bp, Homo sapiens
ttatgctgagracccctaaaa

SEQ ID NO: 16811 - DNA, 21 bp, Homo sapiens
gtacatagtcmgtactcaata

SEQ ID NO: 16812 - DNA, 21 bp, Homo sapiens
aaagattaatmgtatatgatc

SEQ ID NO: 16813 - DNA, 21 bp, Homo sapiens
aaagatctttmaggtcgtatc

SEQ ID NO: 16814 - DNA, 21 bp, Homo sapiens
taataaagcarttttcttctc

SEQ ID NO: 16815 - DNA, 21 bp, Homo sapiens
gagatggagcrcttatagaag

SEQ ID NO: 16816 - DNA, 21 bp, Homo sapiens
ttagatttttkatttctttca

SEQ ID NO: 16817 - DNA, 21 bp, Homo sapiens
cagcgtaagaractttggagt

SEQ ID NO: 16818 - DNA, 21 bp, Homo sapiens
ttcattcaagyagtccttagc

SEQ ID NO: 16819 - DNA, 21 bp, Homo sapiens
attttaggagrtgttctaatt

SEQ ID NO: 16820 - DNA, 21 bp, Homo sapiens
tgggttggtcrtatagtctgg

SEQ ID NO: 16821 - DNA, 21 bp, Homo sapiens
agagattggcrattgcttctt

SEQ ID NO: 16822 - DNA, 21 bp, Homo sapiens
gtctttttctkttcgaccttt

SEQ ID NO: 16823 - DNA, 21 bp, Homo sapiens
tcagatttttrctttcagttt

SEQ ID NO: 16824 - DNA, 21 bp, Homo sapiens
taacctataayggccagagag

SEQ ID NO: 16825 - DNA, 21 bp, Homo sapiens
ccaagttgttygaatcatcca

SEQ ID NO: 16826 - DNA, 21 bp, Homo sapiens
catatctgaarcatctaaaca

SEQ ID NO: 16827 - DNA, 21 bp, Homo sapiens
tgccaacagcyccttgttaca

SEQ ID NO: 16828 - DNA, 21 bp, Homo sapiens
agcctgacgtkttttgtggac

SEQ ID NO: 16829 - DNA, 21 bp, Homo sapiens
aacttttaccygttcatcaac

SEQ ID NO: 16830 - DNA, 21 bp, Homo sapiens
tggacaaactyctctacagca

SEQ ID NO: 16831 - DNA, 21 bp, Homo sapiens
tggctctcttmttatgactct

SEQ ID NO: 16832 - DNA, 21 bp, Homo sapiens
tggtcagattyccaaaatata

SEQ ID NO: 16833 - DNA, 21 bp, Homo sapiens
ggtagcaagcrtagccctcac

SEQ ID NO: 16834 - DNA, 21 bp, Homo sapiens
aatccctttcytattagttcc

SEQ ID NO: 16835 - DNA, 21 bp, Homo sapiens
ttgacaagagrtaatttccca

SEQ ID NO: 16836 - DNA, 21 bp, Homo sapiens
tatgattggcytttttaatta

SEQ ID NO: 16837 - DNA, 21 bp, Homo sapiens
tggttaccaarggtttgggat

SEQ ID NO: 16838 - DNA, 21 bp, Homo sapiens
aacagcttacytcttatcagg

SEQ ID NO: 16839 - DNA, 21 bp, Homo sapiens
atcacagtacraaatcctgtt

SEQ ID NO: 16840 - DNA, 21 bp, Homo sapiens
tagctgccatktaaaggtaga

SEQ ID NO: 16841 - DNA, 21 bp, Homo sapiens
taattaattcrggtcactaca

SEQ ID NO: 16842 - DNA, 21 bp, Homo sapiens
gtccttcaaartcaccaagtg

SEQ ID NO: 16843 - DNA, 21 bp, Homo sapiens
ggttctgagarctcacctctg

SEQ ID NO: 16844 - DNA, 21 bp, Homo sapiens
attaagatacrgtaaggtcat

SEQ ID NO: 16845 - DNA, 21 bp, Homo sapiens
actttcctatyagcttgagaa

SEQ ID NO: 16846 - DNA, 21 bp, Homo sapiens
ggaagaaaatyggcatataaa

SEQ ID NO: 16847 - DNA, 21 bp, Homo sapiens
gggaagaaagyagagggtgga

SEQ ID NO: 16848 - DNA, 21 bp, Homo sapiens
cagtatattcrcatccagtga

SEQ ID NO: 16849 - DNA, 21 bp, Homo sapiens
tgaatgctttrgatcacccat

SEQ ID NO: 16850 - DNA, 21 bp, Homo sapiens
caacaaagagratgaaatgca

SEQ ID NO: 16851 - DNA, 21 bp, Homo sapiens
tgttactacayacatacgttc

SEQ ID NO: 16852 - DNA, 21 bp, Homo sapiens
taatttgtagmcaacattcct

SEQ ID NO: 16853 - DNA, 21 bp, Homo sapiens
aaatttataaygagcagtggc

SEQ ID NO: 16854 - DNA, 21 bp, Homo sapiens
tgctttctatrgtttaaaaaa

SEQ ID NO: 16855 - DNA, 21 bp, Homo sapiens
tattgttgagygcagagcagg

SEQ ID NO: 16856 - DNA, 21 bp, Homo sapiens
aggcagctgakattcaaaaat

SEQ ID NO: 16857 - DNA, 21 bp, Homo sapiens
taactctagtyctcttgatgt

SEQ ID NO: 16858 - DNA, 21 bp, Homo sapiens
acatgctttcytattgctcat

SEQ ID NO: 16859 - DNA, 21 bp, Homo sapiens
gccctcttgargctattttct

SEQ ID NO: 16860 - DNA, 21 bp, Homo sapiens
atttattggtrttttttgggt

SEQ ID NO: 16861 - DNA, 21 bp, Homo sapiens
ttcctaaattkaagtttaatc

SEQ ID NO: 16862 - DNA, 21 bp, Homo sapiens
gggaacacaarggcatgttta

SEQ ID NO: 16863 - DNA, 21 bp, Homo sapiens
gccatacaagkttcacctgag

SEQ ID NO: 16864 - DNA, 21 bp, Homo sapiens
gactaaagtgyccccttactc

SEQ ID NO: 16865 - DNA, 21 bp, Homo sapiens
gtgttggtgaytatcaacata

SEQ ID NO: 16866 - DNA, 21 bp, Homo sapiens
cttctttggartactcaagtt

SEQ ID NO: 16867 - DNA, 21 bp, Homo sapiens
tttttcatctrtaagtaagag

SEQ ID NO: 16868 - DNA, 21 bp, Homo sapiens
tttgagtttcmcttaagattt

SEQ ID NO: 16869 - DNA, 21 bp, Homo sapiens
tgtaaagttarcatactccat

SEQ ID NO: 16870 - DNA, 21 bp, Homo sapiens
tcacatagggygcccttgtcc

SEQ ID NO: 16871 - DNA, 21 bp, Homo sapiens
agaagttttcrtgatccttag

SEQ ID NO: 16872 - DNA, 21 bp, Homo sapiens
agaggcacgcygcagaagtac

SEQ ID NO: 16873 - DNA, 21 bp, Homo sapiens
ttcttttgggyacacaagaag

SEQ ID NO: 16874 - DNA, 21 bp, Homo sapiens
cacatacccayacccacatac

SEQ ID NO: 16875 - DNA, 21 bp, Homo sapiens
aaacaagtagygatgttcaaa

SEQ ID NO: 16876 - DNA, 21 bp, Homo sapiens
tttccttgccraagaaatatt

SEQ ID NO: 16877 - DNA, 21 bp, Homo sapiens
acttgacttaygtatcattct

SEQ ID NO: 16878 - DNA, 21 bp, Homo sapiens
gacataaatgkaattccacag

SEQ ID NO: 16879 - DNA, 21 bp, Homo sapiens
cctagttaatrtgctctggga

SEQ ID NO: 16880 - DNA, 21 bp, Homo sapiens
tatgagtaaamcacccatgaa

SEQ ID NO: 16881 - DNA, 21 bp, Homo sapiens
tgaagatttgyctcaatgtct

SEQ ID NO: 16882 - DNA, 21 bp, Homo sapiens
aatcctcctgrctttcagaag

SEQ ID NO: 16883 - DNA, 21 bp, Homo sapiens
gcttaaagaayagtcacatac

SEQ ID NO: 16884 - DNA, 21 bp, Homo sapiens
ccttcagctcrgttaaatact

SEQ ID NO: 16885 - DNA, 21 bp, Homo sapiens
tgctgtatagyagcaaagctt

SEQ ID NO: 16886 - DNA, 21 bp, Homo sapiens
tataaggaccrttgacactga

SEQ ID NO: 16887 - DNA, 21 bp, Homo sapiens
agactgagcamataaagacat

SEQ ID NO: 16888 - DNA, 21 bp, Homo sapiens
tccaggaatargaatggcaac

SEQ ID NO: 16889 - DNA, 21 bp, Homo sapiens
tctgcccaagktagaaggaga

SEQ ID NO: 16890 - DNA, 21 bp, Homo sapiens
gccaaaagcarttgaggaagc

SEQ ID NO: 16891 - DNA, 21 bp, Homo sapiens
aaacattttgraaaagaagaa

SEQ ID NO: 16892 - DNA, 21 bp, Homo sapiens
atcttatctcrgggtgtatta

SEQ ID NO: 16893 - DNA, 21 bp, Homo sapiens
tttccagtacyaaccgcctta

SEQ ID NO: 16894 - DNA, 21 bp, Homo sapiens
tctagcacaamctggtcaaaa

SEQ ID NO: 16895 - DNA, 21 bp, Homo sapiens
aagttggcccyccagtggcca

SEQ ID NO: 16896 - DNA, 21 bp, Homo sapiens
tcatcagcttygtacatactg

SEQ ID NO: 16897 - DNA, 21 bp, Homo sapiens
ggccacagtcmtggggtcaag

SEQ ID NO: 16898 - DNA, 21 bp, Homo sapiens
tgttttgctgytgttattatt

SEQ ID NO: 16899 - DNA, 21 bp, Homo sapiens
tttcttttcckttttaccaag

SEQ ID NO: 16900 - DNA, 21 bp, Homo sapiens
cacagcccagrgaaagtggct

SEQ ID NO: 16901 - DNA, 21 bp, Homo sapiens
agcagacaagrtagagaaggc

SEQ ID NO: 16902 - DNA, 21 bp, Homo sapiens
ttcaaaactcyaaggaaggcc

SEQ ID NO: 16903 - DNA, 21 bp, Homo sapiens
gctcagatctyagctctcagt

SEQ ID NO: 16904 - DNA, 21 bp, Homo sapiens
caaacacataraaaattagtg

SEQ ID NO: 16905 - DNA, 21 bp, Homo sapiens
gcacccaattkatggcatgat

SEQ ID NO: 16906 - DNA, 21 bp, Homo sapiens
tgactgtgtgrttccatttct

SEQ ID NO: 16907 - DNA, 21 bp, Homo sapiens
cccccagggcmctggaaacag

SEQ ID NO: 16908 - DNA, 21 bp, Homo sapiens
gaaaataataytggcaacatg

SEQ ID NO: 16909 - DNA, 21 bp, Homo sapiens
gttggtgtccrcacagagaag

SEQ ID NO: 16910 - DNA, 21 bp, Homo sapiens
tgcctttaacrtatccctcat

SEQ ID NO: 16911 - DNA, 21 bp, Homo sapiens
gaagagaattygtgaatgtag

SEQ ID NO: 16912 - DNA, 21 bp, Homo sapiens
tgtgtcatctyaggcagtgat

SEQ ID NO: 16913 - DNA, 21 bp, Homo sapiens
cttggtggatygatacttttg

SEQ ID NO: 16914 - DNA, 21 bp, Homo sapiens
agcagccaaarctagatcata

SEQ ID NO: 16915 - DNA, 21 bp, Homo sapiens
ttctttcagcyagttcctttt

SEQ ID NO: 16916 - DNA, 21 bp, Homo sapiens
agtatgttgaraaaatgatat

SEQ ID NO: 16917 - DNA, 21 bp, Homo sapiens
acttttggtgrgagaaattgc

SEQ ID NO: 16918 - DNA, 21 bp, Homo sapiens
tgaagagaatyattctactag

SEQ ID NO: 16919 - DNA, 21 bp, Homo sapiens
tcatgcattgraaattgactg

SEQ ID NO: 16920 - DNA, 21 bp, Homo sapiens
ctatcacaaartatactgcag

SEQ ID NO: 16921 - DNA, 21 bp, Homo sapiens
gagaagcaagkgtcttaattg

SEQ ID NO: 16922 - DNA, 21 bp, Homo sapiens
ttctataaackatgccatttt

SEQ ID NO: 16923 - DNA, 21 bp, Homo sapiens
ttgtcactccyttgcttaaca

SEQ ID NO: 16924 - DNA, 21 bp, Homo sapiens
agataaaattmtaagtgaagg

SEQ ID NO: 16925 - DNA, 21 bp, Homo sapiens
ttttaaaagcrttacttaaaa

SEQ ID NO: 16926 - DNA, 21 bp, Homo sapiens
gagaagagctrtacaggaggg

SEQ ID NO: 16927 - DNA, 21 bp, Homo sapiens
gggttgagagyggtcaatatt

SEQ ID NO: 16928 - DNA, 21 bp, Homo sapiens
cccttgatcamagtgaagata

SEQ ID NO: 16929 - DNA, 21 bp, Homo sapiens
gagtggaaatrgagaatggtg

SEQ ID NO: 16930 - DNA, 21 bp, Homo sapiens
aggatggcccyacattgaaaa

SEQ ID NO: 16931 - DNA, 21 bp, Homo sapiens
ttggggtgacrtctccagctt

SEQ ID NO: 16932 - DNA, 21 bp, Homo sapiens
ttaagtgtacygttaatcttt

SEQ ID NO: 16933 - DNA, 21 bp, Homo sapiens
cagcaaaggakcccactgacc

SEQ ID NO: 16934 - DNA, 21 bp, Homo sapiens
caacaagagckcatcagaaac

SEQ ID NO: 16935 - DNA, 21 bp, Homo sapiens
gctgcctgccygatggcaccc

SEQ ID NO: 16936 - DNA, 21 bp, Homo sapiens
tagccttgtcrattccccagt

SEQ ID NO: 16937 - DNA, 21 bp, Homo sapiens
gtccatcacayttttttttct

SEQ ID NO: 16938 - DNA, 21 bp, Homo sapiens
tcaaacttacyttgcagatta

SEQ ID NO: 16939 - DNA, 21 bp, Homo sapiens
ggtttgctagytgcttcaaat

SEQ ID NO: 16940 - DNA, 21 bp, Homo sapiens
tacatccatcytgctgtctgc

SEQ ID NO: 16941 - DNA, 21 bp, Homo sapiens
tattatctgcycttatgtcat

SEQ ID NO: 16942 - DNA, 21 bp, Homo sapiens
cacatccgtcmaggcattgat

SEQ ID NO: 16943 - DNA, 21 bp, Homo sapiens
ggaaaatacartcctcatggg

SEQ ID NO: 16944 - DNA, 21 bp, Homo sapiens
agcacacagayccaagaatct

SEQ ID NO: 16945 - DNA, 21 bp, Homo sapiens
tggcagcttgraattggcaat

SEQ ID NO: 16946 - DNA, 21 bp, Homo sapiens
acaatcatccyactggactgg

SEQ ID NO: 16947 - DNA, 21 bp, Homo sapiens
tgccttccccygtagttttac

SEQ ID NO: 16948 - DNA, 21 bp, Homo sapiens
aggaggttgcrtaggaaaagg

SEQ ID NO: 16949 - DNA, 21 bp, Homo sapiens
caggttcccakgtgaacccca

SEQ ID NO: 16950 - DNA, 21 bp, Homo sapiens
ttcacaaaatraagactccct

SEQ ID NO: 16951 - DNA, 21 bp, Homo sapiens
cagtacgatgyaattcagaat

SEQ ID NO: 16952 - DNA, 21 bp, Homo sapiens
gcctttcttcmctccccaact

SEQ ID NO: 16953 - DNA, 21 bp, Homo sapiens
cccgagccccrgcaaccactg

SEQ ID NO: 16954 - DNA, 21 bp, Homo sapiens
gtagatggtgyttctgacatt

SEQ ID NO: 16955 - DNA, 21 bp, Homo sapiens
gattccaggaygaggaaagag

SEQ ID NO: 16956 - DNA, 21 bp, Homo sapiens
gttgtagaatmgagagatttt

SEQ ID NO: 16957 - DNA, 21 bp, Homo sapiens
aaaacctcttytccagcaccc

SEQ ID NO: 16958 - DNA, 21 bp, Homo sapiens
ccatgtgtctygctgtagcct

SEQ ID NO: 16959 - DNA, 21 bp, Homo sapiens
ctgtggacctkttattttcca

SEQ ID NO: 16960 - DNA, 21 bp, Homo sapiens
attctcttcckctttcacatt

SEQ ID NO: 16961 - DNA, 21 bp, Homo sapiens
tctctgtcatrgtgatctctc

SEQ ID NO: 16962 - DNA, 21 bp, Homo sapiens
aggacgtgttygcaactcctc

SEQ ID NO: 16963 - DNA, 21 bp, Homo sapiens
tttggcaggcrcctggctcac

SEQ ID NO: 16964 - DNA, 21 bp, Homo sapiens
gacacacacakctttttttct

SEQ ID NO: 16965 - DNA, 21 bp, Homo sapiens
cagactttggrgcagccctgc

SEQ ID NO: 16966 - DNA, 21 bp, Homo sapiens
gcactgctggktaggaaaatc

SEQ ID NO: 16967 - DNA, 21 bp, Homo sapiens
tgcagtaaggrgtgctgagtc

SEQ ID NO: 16968 - DNA, 21 bp, Homo sapiens
ctcactgagcrgagcaaacac

SEQ ID NO: 16969 - DNA, 21 bp, Homo sapiens
atctcgtcaaytggaatcacc

SEQ ID NO: 16970 - DNA, 21 bp, Homo sapiens
ccttctgacaratagtaagaa

SEQ ID NO: 16971 - DNA, 21 bp, Homo sapiens
agatttgatcycgatacgtgg

SEQ ID NO: 16972 - DNA, 21 bp, Homo sapiens
aagggcacgcrtgggaggcgt

SEQ ID NO: 16973 - DNA, 21 bp, Homo sapiens
caaagcgctgyttctgttccc

SEQ ID NO: 16974 - DNA, 21 bp, Homo sapiens
tgaaaaactcrtactgagtgt

SEQ ID NO: 16975 - DNA, 21 bp, Homo sapiens
agatgaacatygattatgtgg

SEQ ID NO: 16976 - DNA, 21 bp, Homo sapiens
acagactaatygtgtgtccgg

SEQ ID NO: 16977 - DNA, 21 bp, Homo sapiens
agcaaaggctrtctaccagaa

SEQ ID NO: 16978 - DNA, 21 bp, Homo sapiens
aagcatctccrttaaagctgg

SEQ ID NO: 16979 - DNA, 21 bp, Homo sapiens
aacaaaacccyacacaagctg

SEQ ID NO: 16980 - DNA, 21 bp, Homo sapiens
aaacacagccraggccaccag

SEQ ID NO: 16981 - DNA, 21 bp, Homo sapiens
tctgttgggcraggcggattg

SEQ ID NO: 16982 - DNA, 21 bp, Homo sapiens
cagggcctctmagacacggat

SEQ ID NO: 16983 - DNA, 21 bp, Homo sapiens
ctgaaaagccrtacctcctaa

SEQ ID NO: 16984 - DNA, 21 bp, Homo sapiens
aaacaggaggraattcataca

SEQ ID NO: 16985 - DNA, 21 bp, Homo sapiens
cctttctctcmtgcaataaca

SEQ ID NO: 16986 - DNA, 21 bp, Homo sapiens
agggcaatatycccttgaagc

SEQ ID NO: 16987 - DNA, 21 bp, Homo sapiens
ctaattatttyaacatcattt

SEQ ID NO: 16988 - DNA, 21 bp, Homo sapiens
atgatgagtakgactttgcaa

SEQ ID NO: 16989 - DNA, 21 bp, Homo sapiens
aaaattatggrtcatatgata

SEQ ID NO: 16990 - DNA, 21 bp, Homo sapiens
tatgaagaaamatgaagatat

SEQ ID NO: 16991 - DNA, 21 bp, Homo sapiens
ttctcttttcratggcataat

SEQ ID NO: 16992 - DNA, 21 bp, Homo sapiens
aaagtatgctrttttttttct

SEQ ID NO: 16993 - DNA, 21 bp, Homo sapiens
ctcacccactrtcacccacca

SEQ ID NO: 16994 - DNA, 21 bp, Homo sapiens
gttcatgagtrcccaacattt

SEQ ID NO: 16995 - DNA, 21 bp, Homo sapiens
tgactgggacragaaagggaa

SEQ ID NO: 16996 - DNA, 21 bp, Homo sapiens
attagttccaraactgtgtgg

SEQ ID NO: 16997 - DNA, 21 bp, Homo sapiens
tgttggaaatrcgatttaaag

SEQ ID NO: 16998 - DNA, 21 bp, Homo sapiens
gaataatgaaraaagcagctt

SEQ ID NO: 16999 - DNA, 21 bp, Homo sapiens
cagaactattkaggcttgttc

SEQ ID NO: 17000 - DNA, 21 bp, Homo sapiens
cataccatccyattcagaaag

SEQ ID NO: 17001 - DNA, 21 bp, Homo sapiens
cagcggtaaaytctgtgaaac

SEQ ID NO: 17002 - DNA, 21 bp, Homo sapiens
tacaaacatcygaatagcaca

SEQ ID NO: 17003 - DNA, 21 bp, Homo sapiens
tcaagaaaatktgtctactgc

SEQ ID NO: 17004 - DNA, 21 bp, Homo sapiens
cttcttgtttyttcacaaaca

SEQ ID NO: 17005 - DNA, 21 bp, Homo sapiens
cactattgctyttgcaacatg

SEQ ID NO: 17006 - DNA, 21 bp, Homo sapiens
ccaggaccacytggtcaccct

SEQ ID NO: 17007 - DNA, 21 bp, Homo sapiens
tgtgataaccygataataaag

SEQ ID NO: 17008 - DNA, 21 bp, Homo sapiens
accatctgtgyatctccctga

SEQ ID NO: 17009 - DNA, 21 bp, Homo sapiens
tccagtgataygtaattgctg

SEQ ID NO: 17010 - DNA, 21 bp, Homo sapiens
agcagactagrcatttagcgt

SEQ ID NO: 17011 - DNA, 21 bp, Homo sapiens
tattccactcyttgattctgt

SEQ ID NO: 17012 - DNA, 21 bp, Homo sapiens
cttgcttacaytgaccttcat

SEQ ID NO: 17013 - DNA, 21 bp, Homo sapiens
gctgtagaaaractattaaaa

SEQ ID NO: 17014 - DNA, 21 bp, Homo sapiens
ttttgctatamgttgcatttg

SEQ ID NO: 17015 - DNA, 21 bp, Homo sapiens
tttctcctaakcccacagtat

SEQ ID NO: 17016 - DNA, 21 bp, Homo sapiens
aagaaagtggrgagagctgga

SEQ ID NO: 17017 - DNA, 21 bp, Homo sapiens
gtgaagatacrtaactgttag

SEQ ID NO: 17018 - DNA, 21 bp, Homo sapiens
tgatgaagttmggcttgtacc

SEQ ID NO: 17019 - DNA, 21 bp, Homo sapiens
agcgggaaaargctaatggct

SEQ ID NO: 17020 - DNA, 21 bp, Homo sapiens
gtttaatgacrtaaaaacaga

SEQ ID NO: 17021 - DNA, 21 bp, Homo sapiens
cccactttaaytgtttcatag

SEQ ID NO: 17022 - DNA, 21 bp, Homo sapiens
ctgaagaacakatgagagaag

SEQ ID NO: 17023 - DNA, 21 bp, Homo sapiens
gatttcttccyggcacatagc

SEQ ID NO: 17024 - DNA, 21 bp, Homo sapiens
ctcttaaactrtactttccat

SEQ ID NO: 17025 - DNA, 21 bp, Homo sapiens
ggaccatgacrtgtcattatt

SEQ ID NO: 17026 - DNA, 21 bp, Homo sapiens
ttacttcttcygtattactaa

SEQ ID NO: 17027 - DNA, 21 bp, Homo sapiens
ggtacatatcygagaatgtga

SEQ ID NO: 17028 - DNA, 21 bp, Homo sapiens
agggtggacaytgtagcttgt

SEQ ID NO: 17029 - DNA, 21 bp, Homo sapiens
gatattaattkttcttacaga

SEQ ID NO: 17030 - DNA, 21 bp, Homo sapiens
attacagactmacttctacct

SEQ ID NO: 17031 - DNA, 21 bp, Homo sapiens
caaaaaaacaygtgagtcaac

SEQ ID NO: 17032 - DNA, 21 bp, Homo sapiens
ttcatgtatcrttactgaagt

SEQ ID NO: 17033 - DNA, 21 bp, Homo sapiens
aaatcaaagakaaagtcaaat

SEQ ID NO: 17034 - DNA, 21 bp, Homo sapiens
atgaattggaraaactttccc

SEQ ID NO: 17035 - DNA, 21 bp, Homo sapiens
tcagcctactracagctagaa

SEQ ID NO: 17036 - DNA, 21 bp, Homo sapiens
ggtttagcacragaacctaca

SEQ ID NO: 17037 - DNA, 21 bp, Homo sapiens
cgcaaagaagktgcaccaatg

SEQ ID NO: 17038 - DNA, 21 bp, Homo sapiens
gctacaaataygcagtaaaat

SEQ ID NO: 17039 - DNA, 21 bp, Homo sapiens
tggggatctcmaggacctctc

SEQ ID NO: 17040 - DNA, 21 bp, Homo sapiens
atttaaccttyagtttctttc

SEQ ID NO: 17041 - DNA, 21 bp, Homo sapiens
ccagggacaaygaatatttgt

SEQ ID NO: 17042 - DNA, 21 bp, Homo sapiens
tgagtaaataraggtaagttt

SEQ ID NO: 17043 - DNA, 21 bp, Homo sapiens
ccaagaaactmagggaaattc

SEQ ID NO: 17044 - DNA, 21 bp, Homo sapiens
tgcagcaagayacatccttag

SEQ ID NO: 17045 - DNA, 21 bp, Homo sapiens
tttgtaggacraaataacaca

SEQ ID NO: 17046 - DNA, 21 bp, Homo sapiens
taatgttctaytctctgctac

SEQ ID NO: 17047 - DNA, 21 bp, Homo sapiens
aagaaaatggratctgagaag

SEQ ID NO: 17048 - DNA, 21 bp, Homo sapiens
gagcgggccayagttaacagt

SEQ ID NO: 17049 - DNA, 21 bp, Homo sapiens
ttggccactayaaaaagatat

SEQ ID NO: 17050 - DNA, 21 bp, Homo sapiens
tccaggttcamgcttgctggt

SEQ ID NO: 17051 - DNA, 21 bp, Homo sapiens
gctatttttgrggttggggtg

SEQ ID NO: 17052 - DNA, 21 bp, Homo sapiens
ctacacttcamtagagtctta

SEQ ID NO: 17053 - DNA, 21 bp, Homo sapiens
gaaagtagaaytttggcattt

SEQ ID NO: 17054 - DNA, 21 bp, Homo sapiens
atcttttaggragattggagt

SEQ ID NO: 17055 - DNA, 21 bp, Homo sapiens
ttctctctggyctttatttct

SEQ ID NO: 17056 - DNA, 21 bp, Homo sapiens
tctaagtatakctctgcctca

SEQ ID NO: 17057 - DNA, 21 bp, Homo sapiens
tatgtgtgctracaattaagg

SEQ ID NO: 17058 - DNA, 21 bp, Homo sapiens
caacttttctrcttatttcta

SEQ ID NO: 17059 - DNA, 21 bp, Homo sapiens
ttcccctccayactattaaaa

SEQ ID NO: 17060 - DNA, 21 bp, Homo sapiens
caggcaaaaarcaatcagata

SEQ ID NO: 17061 - DNA, 21 bp, Homo sapiens
gttggtggtcrtaagttaaaa

SEQ ID NO: 17062 - DNA, 21 bp, Homo sapiens
tgggaaaatakaattctgcaa

SEQ ID NO: 17063 - DNA, 21 bp, Homo sapiens
gtggaaatttyggacagtagg

SEQ ID NO: 17064 - DNA, 21 bp, Homo sapiens
gtttgattcayattaactgtc

SEQ ID NO: 17065 - DNA, 21 bp, Homo sapiens
acaagaataaytgagctaaaa

SEQ ID NO: 17066 - DNA, 21 bp, Homo sapiens
tataaacaaamaatgaggcca

SEQ ID NO: 17067 - DNA, 21 bp, Homo sapiens
aggctgcagcyatagtactca

SEQ ID NO: 17068 - DNA, 21 bp, Homo sapiens
gtatgactcartatttgtaat

SEQ ID NO: 17069 - DNA, 21 bp, Homo sapiens
tttttctaccrctaactggca

SEQ ID NO: 17070 - DNA, 21 bp, Homo sapiens
ctaattgtgtrtttggcatca

SEQ ID NO: 17071 - DNA, 21 bp, Homo sapiens
tcattctatgycttaataaac

SEQ ID NO: 17072 - DNA, 21 bp, Homo sapiens
acatataatcrgtttaacctg

SEQ ID NO: 17073 - DNA, 21 bp, Homo sapiens
gcaccactttrtagcttgaaa

SEQ ID NO: 17074 - DNA, 21 bp, Homo sapiens
actacattaaratgaatcaaa

SEQ ID NO: 17075 - DNA, 21 bp, Homo sapiens
aggatgaaaaygtccataaat

SEQ ID NO: 17076 - DNA, 21 bp, Homo sapiens
ggacagctacratcagcaacc

SEQ ID NO: 17077 - DNA, 21 bp, Homo sapiens
tctaaattcayagttcagttc

SEQ ID NO: 17078 - DNA, 21 bp, Homo sapiens
ctttgccatcmatttaacagt

SEQ ID NO: 17079 - DNA, 21 bp, Homo sapiens
atatgactcaygaattgaggt

SEQ ID NO: 17080 - DNA, 21 bp, Homo sapiens
agatttttatygtcaaatgag

SEQ ID NO: 17081 - DNA, 21 bp, Homo sapiens
aagggcaggcraatgtgtgtt

SEQ ID NO: 17082 - DNA, 21 bp, Homo sapiens
ggctgaaatcytttctttgaa

SEQ ID NO: 17083 - DNA, 21 bp, Homo sapiens
ttcctcagtcrttcttaactg

SEQ ID NO: 17084 - DNA, 21 bp, Homo sapiens
tatagtaccayaaaacatctg

SEQ ID NO: 17085 - DNA, 21 bp, Homo sapiens
gactgtcatcygtagcagtca

SEQ ID NO: 17086 - DNA, 21 bp, Homo sapiens
ggtagaatttyccagtttgaa

SEQ ID NO: 17087 - DNA, 21 bp, Homo sapiens
caagtcgcagraggagcaaca

SEQ ID NO: 17088 - DNA, 21 bp, Homo sapiens
atgattctacrgagaataaaa

SEQ ID NO: 17089 - DNA, 21 bp, Homo sapiens
atgtggcactrtgtaattcat

SEQ ID NO: 17090 - DNA, 21 bp, Homo sapiens
ccttctttacmctcagctatt

SEQ ID NO: 17091 - DNA, 21 bp, Homo sapiens
gaacttaagartaaatttcgg

SEQ ID NO: 17092 - DNA, 21 bp, Homo sapiens
ttctgccctgyagagctctcc

SEQ ID NO: 17093 - DNA, 21 bp, Homo sapiens
agatacatacyattcaggaac

SEQ ID NO: 17094 - DNA, 21 bp, Homo sapiens
cagtcataccrtgtggcatga

SEQ ID NO: 17095 - DNA, 21 bp, Homo sapiens
gtattgttcayggaaaacaga

SEQ ID NO: 17096 - DNA, 21 bp, Homo sapiens
tgtgaaatctrgtgccggcaa

SEQ ID NO: 17097 - DNA, 21 bp, Homo sapiens
gccatgatatrtatactcata

SEQ ID NO: 17098 - DNA, 21 bp, Homo sapiens
tcctcgttccrgctcattgga

SEQ ID NO: 17099 - DNA, 21 bp, Homo sapiens
taggaatacamatttatgtgc

SEQ ID NO: 17100 - DNA, 21 bp, Homo sapiens
catggtctctrtttcttaaag

SEQ ID NO: 17101 - DNA, 21 bp, Homo sapiens
cttgcttcttrtgttttaaat

SEQ ID NO: 17102 - DNA, 21 bp, Homo sapiens
tgatttatatrttgagcttat

SEQ ID NO: 17103 - DNA, 21 bp, Homo sapiens
ataaatgagtktaaaaagtta

SEQ ID NO: 17104 - DNA, 21 bp, Homo sapiens
tcaaataggarctgtggtaac

SEQ ID NO: 17105 - DNA, 21 bp, Homo sapiens
actactctccyccctcaccct

SEQ ID NO: 17106 - DNA, 21 bp, Homo sapiens
aagtgggtttyaaagacgtta

SEQ ID NO: 17107 - DNA, 21 bp, Homo sapiens
atgcacagtcktaaagattgt

SEQ ID NO: 17108 - DNA, 21 bp, Homo sapiens
aaggtgagtamaatatagaag

SEQ ID NO: 17109 - DNA, 21 bp, Homo sapiens
agccagggctyccaggcaacc

SEQ ID NO: 17110 - DNA, 21 bp, Homo sapiens
agggaggccaycatcaccagc

SEQ ID NO: 17111 - DNA, 21 bp, Homo sapiens
ccccagggatrttaactctgg

SEQ ID NO: 17112 - DNA, 21 bp, Homo sapiens
tctaatcatgytgcacagaag

SEQ ID NO: 17113 - DNA, 21 bp, Homo sapiens
aaattgtgtcycctgtctacc

SEQ ID NO: 17114 - DNA, 21 bp, Homo sapiens
atgatttactrtaacataaaa

SEQ ID NO: 17115 - DNA, 21 bp, Homo sapiens
cacaaaatctycatttgttct

SEQ ID NO: 17116 - DNA, 21 bp, Homo sapiens
tagggcattgyagcatgagcg

SEQ ID NO: 17117 - DNA, 21 bp, Homo sapiens
gcctgtctacragaagactaa

SEQ ID NO: 17118 - DNA, 21 bp, Homo sapiens
gaacaaaatakacaaagtctc

SEQ ID NO: 17119 - DNA, 21 bp, Homo sapiens
tagggatcatrgtggattatt

SEQ ID NO: 17120 - DNA, 21 bp, Homo sapiens
accaatctgtrtgatcttagt

SEQ ID NO: 17121 - DNA, 21 bp, Homo sapiens
catacatccarttgtttattg

SEQ ID NO: 17122 - DNA, 21 bp, Homo sapiens
agtggtggcgmtgctatcttt

SEQ ID NO: 17123 - DNA, 21 bp, Homo sapiens
ttcttttaatyatttttcctt

SEQ ID NO: 17124 - DNA, 21 bp, Homo sapiens
tctagatcacyattaaatgag

SEQ ID NO: 17125 - DNA, 21 bp, Homo sapiens
ggctttttatrgcttacattc

SEQ ID NO: 17126 - DNA, 21 bp, Homo sapiens
ttgaaagggcktttttacgac

SEQ ID NO: 17127 - DNA, 21 bp, Homo sapiens
aaacctcattygcttaagtgg

SEQ ID NO: 17128 - DNA, 21 bp, Homo sapiens
catttaatccyaataaaacta

SEQ ID NO: 17129 - DNA, 21 bp, Homo sapiens
ctctcacagcrtgctgggcat

SEQ ID NO: 17130 - DNA, 21 bp, Homo sapiens
atttaattgcrtctgttcgca

SEQ ID NO: 17131 - DNA, 21 bp, Homo sapiens
tctcatcttaytgggtgggaa

SEQ ID NO: 17132 - DNA, 21 bp, Homo sapiens
caatttgaggktttttttaaa

SEQ ID NO: 17133 - DNA, 21 bp, Homo sapiens
acctggttgcytggtagctgt

SEQ ID NO: 17134 - DNA, 21 bp, Homo sapiens
gactggagtargcaaatgatt

SEQ ID NO: 17135 - DNA, 21 bp, Homo sapiens
ttatacgacgygcagtctaat

SEQ ID NO: 17136 - DNA, 21 bp, Homo sapiens
atgaggtcagycccttgaggg

SEQ ID NO: 17137 - DNA, 21 bp, Homo sapiens
ttgagtttctrtttatcgttt

SEQ ID NO: 17138 - DNA, 21 bp, Homo sapiens
ttccttgtcamatttatctca

SEQ ID NO: 17139 - DNA, 21 bp, Homo sapiens
attaaaaaagyagttgagaat

SEQ ID NO: 17140 - DNA, 21 bp, Homo sapiens
agttcacttayctgaatagct

SEQ ID NO: 17141 - DNA, 21 bp, Homo sapiens
ttcaggagggygttgtcacag

SEQ ID NO: 17142 - DNA, 21 bp, Homo sapiens
caatccgtgtracaaaatcag

SEQ ID NO: 17143 - DNA, 21 bp, Homo sapiens
tcactttagartggaatattc

SEQ ID NO: 17144 - DNA, 21 bp, Homo sapiens
aggcttctagyggaaggtcta

SEQ ID NO: 17145 - DNA, 21 bp, Homo sapiens
ggctcccctcycctcctgtgc

SEQ ID NO: 17146 - DNA, 21 bp, Homo sapiens
ggaatgagatyaccaagtctc

SEQ ID NO: 17147 - DNA, 21 bp, Homo sapiens
caatgttttayttcttgggct

SEQ ID NO: 17148 - DNA, 21 bp, Homo sapiens
ctttccaaaamagttttctta

SEQ ID NO: 17149 - DNA, 21 bp, Homo sapiens
cagagcagttkgagaaacata

SEQ ID NO: 17150 - DNA, 21 bp, Homo sapiens
aaggtgaaaaygtccaaagac

SEQ ID NO: 17151 - DNA, 21 bp, Homo sapiens
tgtacctgccrttgaccttgg

SEQ ID NO: 17152 - DNA, 21 bp, Homo sapiens
gctactgccaygctataatgg

SEQ ID NO: 17153 - DNA, 21 bp, Homo sapiens
atattattctrcctttggtga

SEQ ID NO: 17154 - DNA, 21 bp, Homo sapiens
tatgtacttgyctgcacagtc

SEQ ID NO: 17155 - DNA, 21 bp, Homo sapiens
agacagctcayggcccattag

SEQ ID NO: 17156 - DNA, 21 bp, Homo sapiens
tccaagtagtmatgtgtttac

SEQ ID NO: 17157 - DNA, 21 bp, Homo sapiens
tgcagctcctkttaaaactgt

SEQ ID NO: 17158 - DNA, 21 bp, Homo sapiens
cacatttccargcagagtgga

SEQ ID NO: 17159 - DNA, 21 bp, Homo sapiens
agcccacaaamcagccttcta

SEQ ID NO: 17160 - DNA, 21 bp, Homo sapiens
tcttagactcyacatctatct

SEQ ID NO: 17161 - DNA, 21 bp, Homo sapiens
tgcagattctmctataaggga

SEQ ID NO: 17162 - DNA, 21 bp, Homo sapiens
ctctattaaayatttacataa

SEQ ID NO: 17163 - DNA, 21 bp, Homo sapiens
gggtgcaattrattttgtttt

SEQ ID NO: 17164 - DNA, 21 bp, Homo sapiens
agccctcgccragcaagcagc

SEQ ID NO: 17165 - DNA, 21 bp, Homo sapiens
tccactctctygcttattact

SEQ ID NO: 17166 - DNA, 21 bp, Homo sapiens
tgtccctttgyggttcatttc

SEQ ID NO: 17167 - DNA, 21 bp, Homo sapiens
agaaatgaccrgtcctgattc

SEQ ID NO: 17168 - DNA, 21 bp, Homo sapiens
accacccaccmctttaaattt

SEQ ID NO: 17169 - DNA, 21 bp, Homo sapiens
caaagagttaytttattacag

SEQ ID NO: 17170 - DNA, 21 bp, Homo sapiens
agattcctaaytgtgaaatta

SEQ ID NO: 17171 - DNA, 21 bp, Homo sapiens
tattattgccyaatataatcc

SEQ ID NO: 17172 - DNA, 21 bp, Homo sapiens
tatttaggagyaggataagag

SEQ ID NO: 17173 - DNA, 21 bp, Homo sapiens
aatatctctayatcagtatct

SEQ ID NO: 17174 - DNA, 21 bp, Homo sapiens
atgtaacactkttcttctctc

SEQ ID NO: 17175 - DNA, 21 bp, Homo sapiens
ttagacccaaratagagaagg

SEQ ID NO: 17176 - DNA, 21 bp, Homo sapiens
gcattgtcacrcatagggcct

SEQ ID NO: 17177 - DNA, 21 bp, Homo sapiens
catttctgcaygcagcaacca

SEQ ID NO: 17178 - DNA, 21 bp, Homo sapiens
gtggtcattgrgcacttaaat

SEQ ID NO: 17179 - DNA, 21 bp, Homo sapiens
ttgaagagacracccaagcag

SEQ ID NO: 17180 - DNA, 21 bp, Homo sapiens
gttggtatccrgttgagagtt

SEQ ID NO: 17181 - DNA, 21 bp, Homo sapiens
gttcagaattrgtgggaccaa

SEQ ID NO: 17182 - DNA, 21 bp, Homo sapiens
aaagaactttyatttgagaca

SEQ ID NO: 17183 - DNA, 21 bp, Homo sapiens
ctttcttattraggtactctc

SEQ ID NO: 17184 - DNA, 21 bp, Homo sapiens
tcgagagtagyggtgcacttt

SEQ ID NO: 17185 - DNA, 21 bp, Homo sapiens
acctggggcaytgcacacact

SEQ ID NO: 17186 - DNA, 21 bp, Homo sapiens
aattcatagcrgagagaaacc

SEQ ID NO: 17187 - DNA, 21 bp, Homo sapiens
aattattgcartgtagtaaag

SEQ ID NO: 17188 - DNA, 21 bp, Homo sapiens
gagattcttcragcagatgaa

SEQ ID NO: 17189 - DNA, 21 bp, Homo sapiens
tgatctttacrtcctgtgagg

SEQ ID NO: 17190 - DNA, 21 bp, Homo sapiens
ccagattttcrcacctatgca

SEQ ID NO: 17191 - DNA, 21 bp, Homo sapiens
ctccatttctrttgtactgtg

SEQ ID NO: 17192 - DNA, 21 bp, Homo sapiens
acttaataacrgagcaaatcc

SEQ ID NO: 17193 - DNA, 21 bp, Homo sapiens
gtgaaccacayccgcatcaca

SEQ ID NO: 17194 - DNA, 21 bp, Homo sapiens
tacagactccrctgttcagtt

SEQ ID NO: 17195 - DNA, 21 bp, Homo sapiens
ttaaaaattcmggactcccat

SEQ ID NO: 17196 - DNA, 21 bp, Homo sapiens
tcagatagtgkagtgagctat

SEQ ID NO: 17197 - DNA, 21 bp, Homo sapiens
aagtcaagttyccctatcatc

SEQ ID NO: 17198 - DNA, 21 bp, Homo sapiens
agagcagtgarcccattggta

SEQ ID NO: 17199 - DNA, 21 bp, Homo sapiens
tttcatccccragtcctctac

SEQ ID NO: 17200 - DNA, 21 bp, Homo sapiens
caggttcctaktaaactctac

SEQ ID NO: 17201 - DNA, 21 bp, Homo sapiens
tctgcagcccytatggatgtc

SEQ ID NO: 17202 - DNA, 21 bp, Homo sapiens
aagatctcagrtattcaccag

SEQ ID NO: 17203 - DNA, 21 bp, Homo sapiens
agaggcatgakatttggagtt

SEQ ID NO: 17204 - DNA, 21 bp, Homo sapiens
tgttctgtgaycttgcatctc

SEQ ID NO: 17205 - DNA, 21 bp, Homo sapiens
acatgcccggyacatagtagc

SEQ ID NO: 17206 - DNA, 21 bp, Homo sapiens
gtcaaaggagygattggtagt

SEQ ID NO: 17207 - DNA, 21 bp, Homo sapiens
aaggacctggrtgccaggcat

SEQ ID NO: 17208 - DNA, 21 bp, Homo sapiens
tgtaagctctrtgaagagaat

SEQ ID NO: 17209 - DNA, 21 bp, Homo sapiens
ttttgctcagrtcagctgtct

SEQ ID NO: 17210 - DNA, 21 bp, Homo sapiens
agctgtccccrcctcctcttt

SEQ ID NO: 17211 - DNA, 21 bp, Homo sapiens
caaacttcatygtgtacagat

SEQ ID NO: 17212 - DNA, 21 bp, Homo sapiens
tccaaagatayacatagtttg

SEQ ID NO: 17213 - DNA, 21 bp, Homo sapiens
atcaggagaartcaaatatag

SEQ ID NO: 17214 - DNA, 21 bp, Homo sapiens
agagaaaacarattctaccct

SEQ ID NO: 17215 - DNA, 21 bp, Homo sapiens
tcctgaaattmatccagaggc

SEQ ID NO: 17216 - DNA, 21 bp, Homo sapiens
gtatatcacckgtttattcat

SEQ ID NO: 17217 - DNA, 21 bp, Homo sapiens
ttgttcagtcktctaataatt

SEQ ID NO: 17218 - DNA, 21 bp, Homo sapiens
ttccaccactygccttcatcc

SEQ ID NO: 17219 - DNA, 21 bp, Homo sapiens
gtctcgctccygtgatcccag

SEQ ID NO: 17220 - DNA, 21 bp, Homo sapiens
ttgctttcacytgttttggct

SEQ ID NO: 17221 - DNA, 21 bp, Homo sapiens
ttttatccatycaacttgctt

SEQ ID NO: 17222 - DNA, 21 bp, Homo sapiens
tctgctggcayctgacacttt

SEQ ID NO: 17223 - DNA, 21 bp, Homo sapiens
acttagccatrttatcatgat

SEQ ID NO: 17224 - DNA, 21 bp, Homo sapiens
tagccttaacmaagaacagac

SEQ ID NO: 17225 - DNA, 21 bp, Homo sapiens
agaattcaagrtacagaagca

SEQ ID NO: 17226 - DNA, 21 bp, Homo sapiens
ttctcattaaygacttttctg

SEQ ID NO: 17227 - DNA, 21 bp, Homo sapiens
ggtaatctctraaactggcac

SEQ ID NO: 17228 - DNA, 21 bp, Homo sapiens
aggctgggtcrtaattagagt

SEQ ID NO: 17229 - DNA, 21 bp, Homo sapiens
ttgcccctagrccctacttta

SEQ ID NO: 17230 - DNA, 21 bp, Homo sapiens
tcatgcatttrgtcaatagca

SEQ ID NO: 17231 - DNA, 21 bp, Homo sapiens
acacattgaamactttattgt

SEQ ID NO: 17232 - DNA, 21 bp, Homo sapiens
taacagctgayggggctgatg

SEQ ID NO: 17233 - DNA, 21 bp, Homo sapiens
gcagctgcccrgtgacaccat

SEQ ID NO: 17234 - DNA, 21 bp, Homo sapiens
ttggtcctcayagttatccaa

SEQ ID NO: 17235 - DNA, 21 bp, Homo sapiens
aaaatacaccrgagaccagag

SEQ ID NO: 17236 - DNA, 21 bp, Homo sapiens
tggtgactgayggagcccctg

SEQ ID NO: 17237 - DNA, 21 bp, Homo sapiens
gggctgcagakgacacagacc

SEQ ID NO: 17238 - DNA, 21 bp, Homo sapiens
agggctttatrgcaatcaggc

SEQ ID NO: 17239 - DNA, 21 bp, Homo sapiens
ctagtccaccyggctccagcc

SEQ ID NO: 17240 - DNA, 21 bp, Homo sapiens
agccgtcaagmgtgcatctca

SEQ ID NO: 17241 - DNA, 21 bp, Homo sapiens
ctgtgatgccrtcagctcact

SEQ ID NO: 17242 - DNA, 21 bp, Homo sapiens
aatttatacaytcatatcatg

SEQ ID NO: 17243 - DNA, 21 bp, Homo sapiens
catgttttacraagtaggaat

SEQ ID NO: 17244 - DNA, 21 bp, Homo sapiens
actaaacagarttaagccaca

SEQ ID NO: 17245 - DNA, 21 bp, Homo sapiens
tggaactgttmtggctgggaa

SEQ ID NO: 17246 - DNA, 21 bp, Homo sapiens
gtgatatggargtatttgcta

SEQ ID NO: 17247 - DNA, 21 bp, Homo sapiens
tattacagagygaggaaagga

SEQ ID NO: 17248 - DNA, 21 bp, Homo sapiens
tgcatacactrcatcatgtag

SEQ ID NO: 17249 - DNA, 21 bp, Homo sapiens
cctggatgccrttggctaaac

SEQ ID NO: 17250 - DNA, 21 bp, Homo sapiens
tagagcctgtrtcttttttgg

SEQ ID NO: 17251 - DNA, 21 bp, Homo sapiens
gtccagctggytcagggactg

SEQ ID NO: 17252 - DNA, 21 bp, Homo sapiens
aaaagtgtgcytgaagatctt

SEQ ID NO: 17253 - DNA, 21 bp, Homo sapiens
ataagtcaackcacaatgtga

SEQ ID NO: 17254 - DNA, 21 bp, Homo sapiens
acttatctctygtcccctctg

SEQ ID NO: 17255 - DNA, 21 bp, Homo sapiens
ctgattgtgcyttagaatcaa

SEQ ID NO: 17256 - DNA, 21 bp, Homo sapiens
ctggcaacttyagtcaccact

SEQ ID NO: 17257 - DNA, 21 bp, Homo sapiens
accttggaatragaaagtgct

SEQ ID NO: 17258 - DNA, 21 bp, Homo sapiens
gctcagaaacrccctctagaa

SEQ ID NO: 17259 - DNA, 21 bp, Homo sapiens
gcaatcttcckctctccagtt

SEQ ID NO: 17260 - DNA, 21 bp, Homo sapiens
gggggtggttygcagactcag

SEQ ID NO: 17261 - DNA, 21 bp, Homo sapiens
ccgtgagccaytgtgcctggc

SEQ ID NO: 17262 - DNA, 21 bp, Homo sapiens
gcttactcaartaagaatccc

SEQ ID NO: 17263 - DNA, 21 bp, Homo sapiens
tgttttgtgtrgtaatttgtg

SEQ ID NO: 17264 - DNA, 21 bp, Homo sapiens
agcaagaaaaktactcatgcc

SEQ ID NO: 17265 - DNA, 21 bp, Homo sapiens
tgcctttgtgyggatcttccc

SEQ ID NO: 17266 - DNA, 21 bp, Homo sapiens
tctgaaagacragggtagtgg

SEQ ID NO: 17267 - DNA, 21 bp, Homo sapiens
aagctgaactygaagacaagt

SEQ ID NO: 17268 - DNA, 21 bp, Homo sapiens
cactgaccctkccttttccct

SEQ ID NO: 17269 - DNA, 21 bp, Homo sapiens
atgcaagcagrtatacagcgc

SEQ ID NO: 17270 - DNA, 21 bp, Homo sapiens
gtcctagcctrtggaaacacc

SEQ ID NO: 17271 - DNA, 21 bp, Homo sapiens
ttgtgcctagkcctaagtgaa

SEQ ID NO: 17272 - DNA, 21 bp, Homo sapiens
atttgaagccrtatttgaaga

SEQ ID NO: 17273 - DNA, 21 bp, Homo sapiens
agaaaacagcyttgtatttga

SEQ ID NO: 17274 - DNA, 21 bp, Homo sapiens
atgaggtgtaygatgttaaag

SEQ ID NO: 17275 - DNA, 21 bp, Homo sapiens
agaccctattkgtacctgggg

SEQ ID NO: 17276 - DNA, 21 bp, Homo sapiens
actaggatatyagtgctgcta

SEQ ID NO: 17277 - DNA, 21 bp, Homo sapiens
ttcataatcakgatgaaatca

SEQ ID NO: 17278 - DNA, 21 bp, Homo sapiens
tataaagcagkttcatgttca

SEQ ID NO: 17279 - DNA, 21 bp, Homo sapiens
atggatggtgkcaggttaaca

SEQ ID NO: 17280 - DNA, 21 bp, Homo sapiens
aacctactacyagttgctgac

SEQ ID NO: 17281 - DNA, 21 bp, Homo sapiens
gtcgcactaarattctagtaa

SEQ ID NO: 17282 - DNA, 21 bp, Homo sapiens
aaaatcgggaytaaagagaaa

SEQ ID NO: 17283 - DNA, 21 bp, Homo sapiens
gctgcatattmataacttgaa

SEQ ID NO: 17284 - DNA, 21 bp, Homo sapiens
atgagggacgrtgattactaa

SEQ ID NO: 17285 - DNA, 21 bp, Homo sapiens
gcagtgccatratgtacagag

SEQ ID NO: 17286 - DNA, 21 bp, Homo sapiens
tggaaaaactrtagcattgat

SEQ ID NO: 17287 - DNA, 21 bp, Homo sapiens
aaaggcaggtyacagctcaga

SEQ ID NO: 17288 - DNA, 21 bp, Homo sapiens
aactatttccmacaatatagg

SEQ ID NO: 17289 - DNA, 21 bp, Homo sapiens
attattttacygaataagcag

SEQ ID NO: 17290 - DNA, 21 bp, Homo sapiens
taactgtcagkgttgctttat

SEQ ID NO: 17291 - DNA, 21 bp, Homo sapiens
ctgtttcccaytgcattttat

SEQ ID NO: 17292 - DNA, 21 bp, Homo sapiens
agatataaatktctattcaca

SEQ ID NO: 17293 - DNA, 21 bp, Homo sapiens
agaagttaatrtgctatttag

SEQ ID NO: 17294 - DNA, 21 bp, Homo sapiens
ccatttattakttaatttgat

SEQ ID NO: 17295 - DNA, 21 bp, Homo sapiens
actggaagatmatttcaatcc

SEQ ID NO: 17296 - DNA, 21 bp, Homo sapiens
agctgtcattytgagacaagt

SEQ ID NO: 17297 - DNA, 21 bp, Homo sapiens
ttagaaatcayataagttaag

SEQ ID NO: 17298 - DNA, 21 bp, Homo sapiens
agagcaacaartaatgagccc

SEQ ID NO: 17299 - DNA, 21 bp, Homo sapiens
tttgaatcatrgtgttggcag

SEQ ID NO: 17300 - DNA, 21 bp, Homo sapiens
aaacaaaatarttccagaggg

SEQ ID NO: 17301 - DNA, 21 bp, Homo sapiens
agggggaaaamaaaaacaaaa

SEQ ID NO: 17302 - DNA, 21 bp, Homo sapiens
tgatgagaaamgggctcatga

SEQ ID NO: 17303 - DNA, 21 bp, Homo sapiens
gattttctaaytattcagtgt

SEQ ID NO: 17304 - DNA, 21 bp, Homo sapiens
cccagtttctycaataacttt

SEQ ID NO: 17305 - DNA, 21 bp, Homo sapiens
ctggaaaatartttggtaaca

SEQ ID NO: 17306 - DNA, 21 bp, Homo sapiens
gtaattatatrtttgcctgtt

SEQ ID NO: 17307 - DNA, 21 bp, Homo sapiens
aggggaaaaaytggaacttcc

SEQ ID NO: 17308 - DNA, 21 bp, Homo sapiens
tatgtactaamtatcttccag

SEQ ID NO: 17309 - DNA, 21 bp, Homo sapiens
tttgacatttmtaaattttgt

SEQ ID NO: 17310 - DNA, 21 bp, Homo sapiens
ccacacacaaytggtaaaggt

SEQ ID NO: 17311 - DNA, 21 bp, Homo sapiens
atcaggtggarcctaatcaag

SEQ ID NO: 17312 - DNA, 21 bp, Homo sapiens
gagtacctgartgtctttcac

SEQ ID NO: 17313 - DNA, 21 bp, Homo sapiens
tagaacttgayggagatgcag

SEQ ID NO: 17314 - DNA, 21 bp, Homo sapiens
ccggtctccaraatagagcct

SEQ ID NO: 17315 - DNA, 21 bp, Homo sapiens
tgactcccacrccccctcccc

SEQ ID NO: 17316 - DNA, 21 bp, Homo sapiens
tttcctgattyatcctgctag

SEQ ID NO: 17317 - DNA, 21 bp, Homo sapiens
aggaaagtggygttaacctga

SEQ ID NO: 17318 - DNA, 21 bp, Homo sapiens
tttttctggtyggaaaactct

SEQ ID NO: 17319 - DNA, 21 bp, Homo sapiens
taattaggccyacttggggca

SEQ ID NO: 17320 - DNA, 21 bp, Homo sapiens
tcaatgtgagyactgacaaat

SEQ ID NO: 17321 - DNA, 21 bp, Homo sapiens
tttcaggaggyctcagggcaa

SEQ ID NO: 17322 - DNA, 21 bp, Homo sapiens
ccctaacagcrtacctggaac

SEQ ID NO: 17323 - DNA, 21 bp, Homo sapiens
gacacattagyttttgctccc

SEQ ID NO: 17324 - DNA, 21 bp, Homo sapiens
ggggtaataayagtacctccc

SEQ ID NO: 17325 - DNA, 21 bp, Homo sapiens
acaacatcacrgagaaggcat

SEQ ID NO: 17326 - DNA, 21 bp, Homo sapiens
tccaatctacyggggagatgt

SEQ ID NO: 17327 - DNA, 21 bp, Homo sapiens
gtattctattytgtaccattg

SEQ ID NO: 17328 - DNA, 21 bp, Homo sapiens
agccaaagcartggtatcaga

SEQ ID NO: 17329 - DNA, 21 bp, Homo sapiens
tccttactacracctttagta

SEQ ID NO: 17330 - DNA, 21 bp, Homo sapiens
aggaaaagctrtttcttctct

SEQ ID NO: 17331 - DNA, 21 bp, Homo sapiens
aatgaacagayattaagcggt

SEQ ID NO: 17332 - DNA, 21 bp, Homo sapiens
ccctaaactayggcaccaagg

SEQ ID NO: 17333 - DNA, 21 bp, Homo sapiens
ggccaaaatargatgcaaagc

SEQ ID NO: 17334 - DNA, 21 bp, Homo sapiens
gttgtctttakaatgaaaagc

SEQ ID NO: 17335 - DNA, 21 bp, Homo sapiens
gattaatgggmggataaggat

SEQ ID NO: 17336 - DNA, 21 bp, Homo sapiens
aagggcgtacrttaacttcaa

SEQ ID NO: 17337 - DNA, 21 bp, Homo sapiens
taccgttactrttacacatcg

SEQ ID NO: 17338 - DNA, 21 bp, Homo sapiens
aaggagctgcrtgcacattcc

SEQ ID NO: 17339 - DNA, 21 bp, Homo sapiens
tgtttattctrtgctgaggtt

SEQ ID NO: 17340 - DNA, 21 bp, Homo sapiens
caggaccaagygtcaggctct

SEQ ID NO: 17341 - DNA, 21 bp, Homo sapiens
tagccagtcayagttgtgtgc

SEQ ID NO: 17342 - DNA, 21 bp, Homo sapiens
agtttctctckaatcttttgt

SEQ ID NO: 17343 - DNA, 21 bp, Homo sapiens
tctttcatgcrtcagtcgagc

SEQ ID NO: 17344 - DNA, 21 bp, Homo sapiens
cactaagactkcactaagtca

SEQ ID NO: 17345 - DNA, 21 bp, Homo sapiens
tggtgttcagragtatggagc

SEQ ID NO: 17346 - DNA, 21 bp, Homo sapiens
gctagtgacayggtaccagga

SEQ ID NO: 17347 - DNA, 21 bp, Homo sapiens
aaagtctcaartaaatcttaa

SEQ ID NO: 17348 - DNA, 21 bp, Homo sapiens
ttcaatgtgtragaaacaact

SEQ ID NO: 17349 - DNA, 21 bp, Homo sapiens
aggaactaaakcctattgctt

SEQ ID NO: 17350 - DNA, 21 bp, Homo sapiens
aaactgaaaaygtagttagct

SEQ ID NO: 17351 - DNA, 21 bp, Homo sapiens
tttctctccayatataacttc

SEQ ID NO: 17352 - DNA, 21 bp, Homo sapiens
ttaagaaagtmtgcctttgat

SEQ ID NO: 17353 - DNA, 21 bp, Homo sapiens
atatagacacrtgtttcaggt

SEQ ID NO: 17354 - DNA, 21 bp, Homo sapiens
tgaccaacttktaattcacga

SEQ ID NO: 17355 - DNA, 21 bp, Homo sapiens
aagtacagtgyaaaaaactta

SEQ ID NO: 17356 - DNA, 21 bp, Homo sapiens
ttggtccagartgaggcacgc

SEQ ID NO: 17357 - DNA, 21 bp, Homo sapiens
aatacaattcrcctggaatta

SEQ ID NO: 17358 - DNA, 21 bp, Homo sapiens
tgcaattgagrtaacaaatgt

SEQ ID NO: 17359 - DNA, 21 bp, Homo sapiens
cttttgtaaargattttagtc

SEQ ID NO: 17360 - DNA, 21 bp, Homo sapiens
gtgggctcaaktggctttttc

SEQ ID NO: 17361 - DNA, 21 bp, Homo sapiens
atgaaacctgycattttccat

SEQ ID NO: 17362 - DNA, 21 bp, Homo sapiens
acccaggggcrgtgctttggt

SEQ ID NO: 17363 - DNA, 21 bp, Homo sapiens
acagcatttcyatgggttaga

SEQ ID NO: 17364 - DNA, 21 bp, Homo sapiens
ccaaactctcygtatgaagtg

SEQ ID NO: 17365 - DNA, 21 bp, Homo sapiens
actctgcatgytctcatgagt

SEQ ID NO: 17366 - DNA, 21 bp, Homo sapiens
gttctttaaarcctaggaagc

SEQ ID NO: 17367 - DNA, 21 bp, Homo sapiens
aatgtgtggcrgattactggg

SEQ ID NO: 17368 - DNA, 21 bp, Homo sapiens
ttttaatatayacttttagac

SEQ ID NO: 17369 - DNA, 21 bp, Homo sapiens
attagcagcaygcaatagaga

SEQ ID NO: 17370 - DNA, 21 bp, Homo sapiens
tttcattcacytggcttcact

SEQ ID NO: 17371 - DNA, 21 bp, Homo sapiens
cccaaaacacycctagagtcc

SEQ ID NO: 17372 - DNA, 21 bp, Homo sapiens
tctggggaggmgttctgagtt

SEQ ID NO: 17373 - DNA, 21 bp, Homo sapiens
ccccaccaccyattctgctac

SEQ ID NO: 17374 - DNA, 21 bp, Homo sapiens
aactctacagktacagttcct

SEQ ID NO: 17375 - DNA, 21 bp, Homo sapiens
tcgctttgtcytttgttttct

SEQ ID NO: 17376 - DNA, 21 bp, Homo sapiens
atatatttccrtttaatggat

SEQ ID NO: 17377 - DNA, 21 bp, Homo sapiens
cctgcattttyaggcttgttt

SEQ ID NO: 17378 - DNA, 21 bp, Homo sapiens
attggtaggtraatgtcaagc

SEQ ID NO: 17379 - DNA, 21 bp, Homo sapiens
atggataaaaracaatttcaa

SEQ ID NO: 17380 - DNA, 21 bp, Homo sapiens
caactcaaaayatccttatca

SEQ ID NO: 17381 - DNA, 21 bp, Homo sapiens
ttataaaatayttttgatctg

SEQ ID NO: 17382 - DNA, 21 bp, Homo sapiens
tagaacttacrgctttgactt

SEQ ID NO: 17383 - DNA, 21 bp, Homo sapiens
gatagtaggaraaaaccaatt

SEQ ID NO: 17384 - DNA, 21 bp, Homo sapiens
agttactatarcataatgaat

SEQ ID NO: 17385 - DNA, 21 bp, Homo sapiens
actcaattatrtgtctgcaaa

SEQ ID NO: 17386 - DNA, 21 bp, Homo sapiens
tcttgctaacracctaacggc

SEQ ID NO: 17387 - DNA, 21 bp, Homo sapiens
tgatgcatacycagggataag

SEQ ID NO: 17388 - DNA, 21 bp, Homo sapiens
tcgtttaaaartgtatggtac

SEQ ID NO: 17389 - DNA, 21 bp, Homo sapiens
aaaagatggcracgtactttg

SEQ ID NO: 17390 - DNA, 21 bp, Homo sapiens
tttaaatgctraggttctgag

SEQ ID NO: 17391 - DNA, 21 bp, Homo sapiens
tagctacttgyctaagtttgc

SEQ ID NO: 17392 - DNA, 21 bp, Homo sapiens
ggaattcaccktcagtgcatc

SEQ ID NO: 17393 - DNA, 21 bp, Homo sapiens
aagctttcctygagtggttgt

SEQ ID NO: 17394 - DNA, 21 bp, Homo sapiens
aaaatctttcyatgatccttc

SEQ ID NO: 17395 - DNA, 21 bp, Homo sapiens
attcaagtacytgattatata

SEQ ID NO: 17396 - DNA, 21 bp, Homo sapiens
caggtcagtaygccaaaggcc

SEQ ID NO: 17397 - DNA, 21 bp, Homo sapiens
tcctccctgtyagatatgaag

SEQ ID NO: 17398 - DNA, 21 bp, Homo sapiens
agtattgtctrtcattgccat

SEQ ID NO: 17399 - DNA, 21 bp, Homo sapiens
gggagacaaayttgcaaatct

SEQ ID NO: 17400 - DNA, 21 bp, Homo sapiens
taaacatgtartaaacacctc

SEQ ID NO: 17401 - DNA, 21 bp, Homo sapiens
gaagtgggtgyccagaggaat

SEQ ID NO: 17402 - DNA, 21 bp, Homo sapiens
gttgggtgtcratgtccagag

SEQ ID NO: 17403 - DNA, 21 bp, Homo sapiens
tacgctcaccrtggaaagagt

SEQ ID NO: 17404 - DNA, 21 bp, Homo sapiens
acaggagaaayggtaggaagt

SEQ ID NO: 17405 - DNA, 21 bp, Homo sapiens
gggaagagggmcccaaaacat

SEQ ID NO: 17406 - DNA, 21 bp, Homo sapiens
cagttaattgrtatggcaata

SEQ ID NO: 17407 - DNA, 21 bp, Homo sapiens
attcctgtggrggaaagggga

SEQ ID NO: 17408 - DNA, 21 bp, Homo sapiens
tttccagcacrtaagtctctg

SEQ ID NO: 17409 - DNA, 21 bp, Homo sapiens
ttctgacaccrttcctaaact

SEQ ID NO: 17410 - DNA, 21 bp, Homo sapiens
aactgtgaggyttttcctttc

SEQ ID NO: 17411 - DNA, 21 bp, Homo sapiens
agaatttggtkgattatttta

SEQ ID NO: 17412 - DNA, 21 bp, Homo sapiens
aaagtatcackgttttcatgt

SEQ ID NO: 17413 - DNA, 21 bp, Homo sapiens
ccttcccacayctctaggcaa

SEQ ID NO: 17414 - DNA, 21 bp, Homo sapiens
cgctggacaaygaaacactgc

SEQ ID NO: 17415 - DNA, 21 bp, Homo sapiens
aagatctcacrtgtaacccaa

SEQ ID NO: 17416 - DNA, 21 bp, Homo sapiens
aactccagagragagagacat

SEQ ID NO: 17417 - DNA, 21 bp, Homo sapiens
tagtggcatamtctttggacc

SEQ ID NO: 17418 - DNA, 21 bp, Homo sapiens
taagctcgatrctctgcagtt

SEQ ID NO: 17419 - DNA, 21 bp, Homo sapiens
cttcagttggyaattaaaaga

SEQ ID NO: 17420 - DNA, 21 bp, Homo sapiens
attatagtctmtcacttgaac

SEQ ID NO: 17421 - DNA, 21 bp, Homo sapiens
ccttttcaatycaatccttct

SEQ ID NO: 17422 - DNA, 21 bp, Homo sapiens
cctcaattccrtcttatctgt

SEQ ID NO: 17423 - DNA, 21 bp, Homo sapiens
atttaccttcraaacattgat

SEQ ID NO: 17424 - DNA, 21 bp, Homo sapiens
ataactactgkcctgattttt

SEQ ID NO: 17425 - DNA, 21 bp, Homo sapiens
acattaaacarttgtcaagaa

SEQ ID NO: 17426 - DNA, 21 bp, Homo sapiens
tcttgaaaggrtgaattagaa

SEQ ID NO: 17427 - DNA, 21 bp, Homo sapiens
ggcaggtcaarcatcatacat

SEQ ID NO: 17428 - DNA, 21 bp, Homo sapiens
taaaggtaagkcatggaattc

SEQ ID NO: 17429 - DNA, 21 bp, Homo sapiens
tagaagtaatraactaacagg

SEQ ID NO: 17430 - DNA, 21 bp, Homo sapiens
aggtaatacargaggtgagta

SEQ ID NO: 17431 - DNA, 21 bp, Homo sapiens
caaatcttttrtccctttcaa

SEQ ID NO: 17432 - DNA, 21 bp, Homo sapiens
accattttacrtttgatttgt

SEQ ID NO: 17433 - DNA, 21 bp, Homo sapiens
aatgagacctytgtattataa

SEQ ID NO: 17434 - DNA, 21 bp, Homo sapiens
ggcagggcgartcaggagggc

SEQ ID NO: 17435 - DNA, 21 bp, Homo sapiens
atggaacagayatttatatgc

SEQ ID NO: 17436 - DNA, 21 bp, Homo sapiens
aagaacagaamaatcctgatg

SEQ ID NO: 17437 - DNA, 21 bp, Homo sapiens
catctgttctyggtgagatgg

SEQ ID NO: 17438 - DNA, 21 bp, Homo sapiens
caaaaatgtcyctacggaact

SEQ ID NO: 17439 - DNA, 21 bp, Homo sapiens
cagcaaaaaaycgtgtatatg

SEQ ID NO: 17440 - DNA, 21 bp, Homo sapiens
tcatctacctrcagaccctct

SEQ ID NO: 17441 - DNA, 21 bp, Homo sapiens
ctctgctgtgmagccacagtt

SEQ ID NO: 17442 - DNA, 21 bp, Homo sapiens
aaggaactgcrgaaagctgac

SEQ ID NO: 17443 - DNA, 21 bp, Homo sapiens
gctgcccctcrcgtggtctcg

SEQ ID NO: 17444 - DNA, 21 bp, Homo sapiens
cagaaccaagrcctagagaga

SEQ ID NO: 17445 - DNA, 21 bp, Homo sapiens
gcaccaccttytttgagacgt

SEQ ID NO: 17446 - DNA, 21 bp, Homo sapiens
cgtgagctatygaacccagcc

SEQ ID NO: 17447 - DNA, 21 bp, Homo sapiens
atgttgaatcrtgttggtgag

SEQ ID NO: 17448 - DNA, 21 bp, Homo sapiens
ccatccaggcygcctaactga

SEQ ID NO: 17449 - DNA, 21 bp, Homo sapiens
cttatgccacrttatcttagc

SEQ ID NO: 17450 - DNA, 21 bp, Homo sapiens
ttatgcatgcratcctaggaa

SEQ ID NO: 17451 - DNA, 21 bp, Homo sapiens
aggcagtatamaggcacttcc

SEQ ID NO: 17452 - DNA, 21 bp, Homo sapiens
gcatgtaaaarctgggcaata

SEQ ID NO: 17453 - DNA, 21 bp, Homo sapiens
tcataagatayggtgaactgg

SEQ ID NO: 17454 - DNA, 21 bp, Homo sapiens
caaatcctatyggagttgtct

SEQ ID NO: 17455 - DNA, 21 bp, Homo sapiens
cgtgtgggggygttcacaggc

SEQ ID NO: 17456 - DNA, 21 bp, Homo sapiens
gctgatggagrtttctgcagt

SEQ ID NO: 17457 - DNA, 21 bp, Homo sapiens
tgtttttatayggattttctt

SEQ ID NO: 17458 - DNA, 21 bp, Homo sapiens
tttctttgccrtcttcgtttt

SEQ ID NO: 17459 - DNA, 21 bp, Homo sapiens
ttcatgctgaygaacgtttga

SEQ ID NO: 17460 - DNA, 21 bp, Homo sapiens
cacataatttkggtataagcc

SEQ ID NO: 17461 - DNA, 21 bp, Homo sapiens
aaattatgctrctctttctct

SEQ ID NO: 17462 - DNA, 21 bp, Homo sapiens
ttttattatcyagcgtctgtt

SEQ ID NO: 17463 - DNA, 21 bp, Homo sapiens
gtctttaatcytccaattctc

SEQ ID NO: 17464 - DNA, 21 bp, Homo sapiens
accaagatggrtcagcgagat

SEQ ID NO: 17465 - DNA, 21 bp, Homo sapiens
aagttgtttcyctaatccgtc

SEQ ID NO: 17466 - DNA, 21 bp, Homo sapiens
agcagcagaayggtaagataa

SEQ ID NO: 17467 - DNA, 21 bp, Homo sapiens
atgtaaaacaracattagagt

SEQ ID NO: 17468 - DNA, 21 bp, Homo sapiens
atgtgagagtrtccaagtttt

SEQ ID NO: 17469 - DNA, 21 bp, Homo sapiens
gttttagtcamccatatgttc

SEQ ID NO: 17470 - DNA, 21 bp, Homo sapiens
tgtaatagacyagaatctgtt

SEQ ID NO: 17471 - DNA, 21 bp, Homo sapiens
acactatataygctgtaaacc

SEQ ID NO: 17472 - DNA, 21 bp, Homo sapiens
gactcattaaycaatgcaggg

SEQ ID NO: 17473 - DNA, 21 bp, Homo sapiens
tgataattaaygtagtaggga

SEQ ID NO: 17474 - DNA, 21 bp, Homo sapiens
attagccttcygctcttttac

SEQ ID NO: 17475 - DNA, 21 bp, Homo sapiens
tcttgtctgcrtatctagcca

SEQ ID NO: 17476 - DNA, 21 bp, Homo sapiens
caattgctatraaagcatcat

SEQ ID NO: 17477 - DNA, 21 bp, Homo sapiens
tgaacatctcygctttatcag

SEQ ID NO: 17478 - DNA, 21 bp, Homo sapiens
ctggccctcaraagagtatta

SEQ ID NO: 17479 - DNA, 21 bp, Homo sapiens
agaaaatacartttctctcct

SEQ ID NO: 17480 - DNA, 21 bp, Homo sapiens
gtccctctttygggggaggga

SEQ ID NO: 17481 - DNA, 21 bp, Homo sapiens
taggcatactycataaaatta

SEQ ID NO: 17482 - DNA, 21 bp, Homo sapiens
acagaagtctrttgaacagga

SEQ ID NO: 17483 - DNA, 21 bp, Homo sapiens
actcccttacrtaatgttagt

SEQ ID NO: 17484 - DNA, 21 bp, Homo sapiens
actgcctaccygatatctcta

SEQ ID NO: 17485 - DNA, 21 bp, Homo sapiens
atatgaaaatktatatacctt

SEQ ID NO: 17486 - DNA, 21 bp, Homo sapiens
tcttaagtaaygaaaagatta

SEQ ID NO: 17487 - DNA, 21 bp, Homo sapiens
gctttcctgcygtcctacact

SEQ ID NO: 17488 - DNA, 21 bp, Homo sapiens
aaataagcaartggagaaccc

SEQ ID NO: 17489 - DNA, 21 bp, Homo sapiens
actcttccttrgaaggccaga

SEQ ID NO: 17490 - DNA, 21 bp, Homo sapiens
gcgtaggtcaytgtgccctgt

SEQ ID NO: 17491 - DNA, 21 bp, Homo sapiens
tcacaccggtycttccatgta

SEQ ID NO: 17492 - DNA, 21 bp, Homo sapiens
acaaggcctcrcacacacacc

SEQ ID NO: 17493 - DNA, 21 bp, Homo sapiens
actaacctcarggtccccact

SEQ ID NO: 17494 - DNA, 21 bp, Homo sapiens
acggtcatacrgacgtcacga

SEQ ID NO: 17495 - DNA, 21 bp, Homo sapiens
atcaattttargctctatacc

SEQ ID NO: 17496 - DNA, 21 bp, Homo sapiens
caacaaactcygaggtgagga

SEQ ID NO: 17497 - DNA, 21 bp, Homo sapiens
gtgactgtgaygctgaagctc

SEQ ID NO: 17498 - DNA, 21 bp, Homo sapiens
tcccaccctckgtcagcagct

SEQ ID NO: 17499 - DNA, 21 bp, Homo sapiens
cagtgtcaggrcaatcctagt

SEQ ID NO: 17500 - DNA, 21 bp, Homo sapiens
aggtcctgaargtcctgcagg

SEQ ID NO: 17501 - DNA, 21 bp, Homo sapiens
agcccactccragcccgttca

SEQ ID NO: 17502 - DNA, 21 bp, Homo sapiens
tcagagtagcracacctaagc

SEQ ID NO: 17503 - DNA, 21 bp, Homo sapiens
ttttctgggcygggggataga

SEQ ID NO: 17504 - DNA, 21 bp, Homo sapiens
ctccctgtgtyttcctctccc

SEQ ID NO: 17505 - DNA, 21 bp, Homo sapiens
ccacaccccayagcctccctt

SEQ ID NO: 17506 - DNA, 21 bp, Homo sapiens
ggtggattagrtaaactcagc

SEQ ID NO: 17507 - DNA, 21 bp, Homo sapiens
atcccctcctrtgttatttct

SEQ ID NO: 17508 - DNA, 21 bp, Homo sapiens
aaaataccttmttcatttcat

SEQ ID NO: 17509 - DNA, 21 bp, Homo sapiens
aaagtcatgtrattagcaagg

SEQ ID NO: 17510 - DNA, 21 bp, Homo sapiens
aaagtgcaaayggggtcctgt

SEQ ID NO: 17511 - DNA, 21 bp, Homo sapiens
atctcttggtygatgaaaagt

SEQ ID NO: 17512 - DNA, 21 bp, Homo sapiens
cccccaaacamcgcaattctt

SEQ ID NO: 17513 - DNA, 21 bp, Homo sapiens
ttttggggacrgtgcaaatat

SEQ ID NO: 17514 - DNA, 21 bp, Homo sapiens
aaatcctgtcmtatttgattg

SEQ ID NO: 17515 - DNA, 21 bp, Homo sapiens
tttattcctgmccaatctatt

SEQ ID NO: 17516 - DNA, 21 bp, Homo sapiens
ctgggcgcttrctaaacttgt

SEQ ID NO: 17517 - DNA, 21 bp, Homo sapiens
cctctgtaackttatctaaaa

SEQ ID NO: 17518 - DNA, 21 bp, Homo sapiens
atataagaaayctctaattaa

SEQ ID NO: 17519 - DNA, 21 bp, Homo sapiens
ttgcttcataraagaagatat

SEQ ID NO: 17520 - DNA, 21 bp, Homo sapiens
tatggttcctrtgaattactg

SEQ ID NO: 17521 - DNA, 21 bp, Homo sapiens
aaatgggggaygttactcaaa

SEQ ID NO: 17522 - DNA, 21 bp, Homo sapiens
taataggactrcatgcatagg

SEQ ID NO: 17523 - DNA, 21 bp, Homo sapiens
tttttatttayttttttagca

SEQ ID NO: 17524 - DNA, 21 bp, Homo sapiens
ggttctgaagkaaaaaggctc

SEQ ID NO: 17525 - DNA, 21 bp, Homo sapiens
cactaccagarctatcctgag

SEQ ID NO: 17526 - DNA, 21 bp, Homo sapiens
aactggggtcmctgagtcaag

SEQ ID NO: 17527 - DNA, 21 bp, Homo sapiens
tgagaaatggyctctccgtga

SEQ ID NO: 17528 - DNA, 21 bp, Homo sapiens
cagagcctcayccaggaaggg

SEQ ID NO: 17529 - DNA, 21 bp, Homo sapiens
ttctttgcctyctaactcact

SEQ ID NO: 17530 - DNA, 21 bp, Homo sapiens
agaaagtccamgttgcctgat

SEQ ID NO: 17531 - DNA, 21 bp, Homo sapiens
cccaccctttyattctcactc

SEQ ID NO: 17532 - DNA, 21 bp, Homo sapiens
cgctcgttacrcaggagagag

SEQ ID NO: 17533 - DNA, 21 bp, Homo sapiens
ggccctccagracacctggct

SEQ ID NO: 17534 - DNA, 21 bp, Homo sapiens
tgaccagactratccccgtcc

SEQ ID NO: 17535 - DNA, 21 bp, Homo sapiens
ttactgatagmaattgacaaa

SEQ ID NO: 17536 - DNA, 21 bp, Homo sapiens
tgtctgtaagrttctgaattc

SEQ ID NO: 17537 - DNA, 21 bp, Homo sapiens
ctaattcataycttgctaatg

SEQ ID NO: 17538 - DNA, 21 bp, Homo sapiens
gctaactcttrtatctaaatt

SEQ ID NO: 17539 - DNA, 21 bp, Homo sapiens
tgggacaagcygatgtattta

SEQ ID NO: 17540 - DNA, 21 bp, Homo sapiens
acccaggttarcatattacct

SEQ ID NO: 17541 - DNA, 21 bp, Homo sapiens
aaatgagagaycttgccatta

SEQ ID NO: 17542 - DNA, 21 bp, Homo sapiens
cttgtatgcartcaagggtct

SEQ ID NO: 17543 - DNA, 21 bp, Homo sapiens
tggaagccttyccgctatgac

SEQ ID NO: 17544 - DNA, 21 bp, Homo sapiens
agaattaaatkctcccattgg

SEQ ID NO: 17545 - DNA, 21 bp, Homo sapiens
cttacaacctrgttggctgaa

SEQ ID NO: 17546 - DNA, 21 bp, Homo sapiens
ataagtagctyggcattattt

SEQ ID NO: 17547 - DNA, 21 bp, Homo sapiens
aacatgttatkgtcaaaatga

SEQ ID NO: 17548 - DNA, 21 bp, Homo sapiens
taagtatttgrttgactcata

SEQ ID NO: 17549 - DNA, 21 bp, Homo sapiens
aacttttattraacataccct

SEQ ID NO: 17550 - DNA, 21 bp, Homo sapiens
cttatgctctyaacaattcca

SEQ ID NO: 17551 - DNA, 21 bp, Homo sapiens
gccattttcargatgcccttc

SEQ ID NO: 17552 - DNA, 21 bp, Homo sapiens
taaatgtagcmccttaacaaa

SEQ ID NO: 17553 - DNA, 21 bp, Homo sapiens
tatgtgaagcrtctgctctat

SEQ ID NO: 17554 - DNA, 21 bp, Homo sapiens
ttgtacaaacmtcctcctcgc

SEQ ID NO: 17555 - DNA, 21 bp, Homo sapiens
ttgagcaactkctaggccctt

SEQ ID NO: 17556 - DNA, 21 bp, Homo sapiens
catgaacggargcgtcacgtg

SEQ ID NO: 17557 - DNA, 21 bp, Homo sapiens
ggagcatctaygtacagaata

SEQ ID NO: 17558 - DNA, 21 bp, Homo sapiens
gtaagtagtgrctgtacatct

SEQ ID NO: 17559 - DNA, 21 bp, Homo sapiens
ttcaacactcktagtctcatt

SEQ ID NO: 17560 - DNA, 21 bp, Homo sapiens
agctgagagtkaatgaataaa

SEQ ID NO: 17561 - DNA, 21 bp, Homo sapiens
tgattcacccktaatctagat

SEQ ID NO: 17562 - DNA, 21 bp, Homo sapiens
gcagcgttatrcattcctttg

SEQ ID NO: 17563 - DNA, 21 bp, Homo sapiens
aactacctgtratacttcaac

SEQ ID NO: 17564 - DNA, 21 bp, Homo sapiens
ctgtgctgagractctgcccc

SEQ ID NO: 17565 - DNA, 21 bp, Homo sapiens
ctaggctcgayggaaccttgg

SEQ ID NO: 17566 - DNA, 21 bp, Homo sapiens
acttgagccayggctggcaca

SEQ ID NO: 17567 - DNA, 21 bp, Homo sapiens
gtaaccctatmctggaatcca

SEQ ID NO: 17568 - DNA, 21 bp, Homo sapiens
agaaagggtarttttatcgtt

SEQ ID NO: 17569 - DNA, 21 bp, Homo sapiens
ctgatcctggrtagagtattt

SEQ ID NO: 17570 - DNA, 21 bp, Homo sapiens
gacccgggtartctcttcctc

SEQ ID NO: 17571 - DNA, 21 bp, Homo sapiens
gtgtcaaactkggatgaaatc

SEQ ID NO: 17572 - DNA, 21 bp, Homo sapiens
tgtatgtgtgygtgtgtgtgc

SEQ ID NO: 17573 - DNA, 21 bp, Homo sapiens
tcaaattcttkttcatttgga

SEQ ID NO: 17574 - DNA, 21 bp, Homo sapiens
ctcaaaaaatrtttgggctca

SEQ ID NO: 17575 - DNA, 21 bp, Homo sapiens
tgaggagcacygctgtagcac

SEQ ID NO: 17576 - DNA, 21 bp, Homo sapiens
tgtgtgcaccrgtaatttaac

SEQ ID NO: 17577 - DNA, 21 bp, Homo sapiens
agcagaggagycacatgatta

SEQ ID NO: 17578 - DNA, 21 bp, Homo sapiens
cccaggtgttkaccctctacc

SEQ ID NO: 17579 - DNA, 21 bp, Homo sapiens
ccttgttttayctcagccgag

SEQ ID NO: 17580 - DNA, 21 bp, Homo sapiens
gcatcaggagrcctggagggg

SEQ ID NO: 17581 - DNA, 21 bp, Homo sapiens
ggtcatttackgtgcttaggg

SEQ ID NO: 17582 - DNA, 21 bp, Homo sapiens
tccgttttcayctgctctttc

SEQ ID NO: 17583 - DNA, 21 bp, Homo sapiens
agaaacggaarctgggtccac

SEQ ID NO: 17584 - DNA, 21 bp, Homo sapiens
ttcaaacaaaytttaagctga

SEQ ID NO: 17585 - DNA, 21 bp, Homo sapiens
acacaatcagrtttgggaagg

SEQ ID NO: 17586 - DNA, 21 bp, Homo sapiens
ggcaagacatmtttttgagag

SEQ ID NO: 17587 - DNA, 21 bp, Homo sapiens
gctctgtaacktgatccttac

SEQ ID NO: 17588 - DNA, 21 bp, Homo sapiens
ccctgggagartcatgcttca

SEQ ID NO: 17589 - DNA, 21 bp, Homo sapiens
ggccatcaggyttggctggag

SEQ ID NO: 17590 - DNA, 21 bp, Homo sapiens
gcacctttcayagttgaacag

SEQ ID NO: 17591 - DNA, 21 bp, Homo sapiens
gaaagatgccrcaatatagaa

SEQ ID NO: 17592 - DNA, 21 bp, Homo sapiens
aaatactctgytggcatagta

SEQ ID NO: 17593 - DNA, 21 bp, Homo sapiens
acaggaaattygtaagacatg

SEQ ID NO: 17594 - DNA, 21 bp, Homo sapiens
cctattagccygcgaaataat

SEQ ID NO: 17595 - DNA, 21 bp, Homo sapiens
ccttcttcaartctttgcact

SEQ ID NO: 17596 - DNA, 21 bp, Homo sapiens
cagaccagatrgcaacaaggg

SEQ ID NO: 17597 - DNA, 21 bp, Homo sapiens
aatagaaaggrgacactgaaa

SEQ ID NO: 17598 - DNA, 21 bp, Homo sapiens
gtggaacacgygtataccagt

SEQ ID NO: 17599 - DNA, 21 bp, Homo sapiens
ttccattgccyggctctcata

SEQ ID NO: 17600 - DNA, 21 bp, Homo sapiens
gacttgttcaktgttcacatt

SEQ ID NO: 17601 - DNA, 21 bp, Homo sapiens
gactggttccrttgcatgcat

SEQ ID NO: 17602 - DNA, 21 bp, Homo sapiens
atctcagcctyttggaccatt

SEQ ID NO: 17603 - DNA, 21 bp, Homo sapiens
tctctaaagaygctttctcca

SEQ ID NO: 17604 - DNA, 21 bp, Homo sapiens
aaacgtttttmtctttgatcc

SEQ ID NO: 17605 - DNA, 21 bp, Homo sapiens
aaccacagacrcactaattat

SEQ ID NO: 17606 - DNA, 21 bp, Homo sapiens
gttctcggttytagccactaa

SEQ ID NO: 17607 - DNA, 21 bp, Homo sapiens
tctgattcctygttgttaaga

SEQ ID NO: 17608 - DNA, 21 bp, Homo sapiens
tctcttgtggkttccaagagt

SEQ ID NO: 17609 - DNA, 21 bp, Homo sapiens
tttagtcccarattggaagct

SEQ ID NO: 17610 - DNA, 21 bp, Homo sapiens
tgtctatagcrtatacaaatg

SEQ ID NO: 17611 - DNA, 21 bp, Homo sapiens
ctactaaatarccaatgagcc

SEQ ID NO: 17612 - DNA, 21 bp, Homo sapiens
caagattaaaytgacttccag

SEQ ID NO: 17613 - DNA, 21 bp, Homo sapiens
ctctgctttcyaagaggcatt

SEQ ID NO: 17614 - DNA, 21 bp, Homo sapiens
ccagctcagayctcctatgtc

SEQ ID NO: 17615 - DNA, 21 bp, Homo sapiens
atcattactcrccaccctgag

SEQ ID NO: 17616 - DNA, 21 bp, Homo sapiens
ttttgtgctgyctgtaccacc

SEQ ID NO: 17617 - DNA, 21 bp, Homo sapiens
catgtgatggytttcctacat

SEQ ID NO: 17618 - DNA, 21 bp, Homo sapiens
ttgaagacccrggcgggctag

SEQ ID NO: 17619 - DNA, 21 bp, Homo sapiens
acacaattcarccattacgag

SEQ ID NO: 17620 - DNA, 21 bp, Homo sapiens
tatcccctgcrcttgtaaagg

SEQ ID NO: 17621 - DNA, 21 bp, Homo sapiens
ttcccacatayattataccaa

SEQ ID NO: 17622 - DNA, 21 bp, Homo sapiens
ctgagttcaaraaagccactg

SEQ ID NO: 17623 - DNA, 21 bp, Homo sapiens
tttgaggtgcragacttgacc

SEQ ID NO: 17624 - DNA, 21 bp, Homo sapiens
atctcagcacrttaggattta

SEQ ID NO: 17625 - DNA, 21 bp, Homo sapiens
acgttctaaarctctaacaca

SEQ ID NO: 17626 - DNA, 21 bp, Homo sapiens
acttcttcttytccttattcc

SEQ ID NO: 17627 - DNA, 21 bp, Homo sapiens
ggtacctgggmtatgcactgc

SEQ ID NO: 17628 - DNA, 21 bp, Homo sapiens
gagcccaatarcccttttagg

SEQ ID NO: 17629 - DNA, 21 bp, Homo sapiens
gtggaaagagrgtgagatgtg

SEQ ID NO: 17630 - DNA, 21 bp, Homo sapiens
ttaggtagtayaagaatccag

SEQ ID NO: 17631 - DNA, 21 bp, Homo sapiens
aggtgatggayacaccctgat

SEQ ID NO: 17632 - DNA, 21 bp, Homo sapiens
cctttctgtakccagtcatcc

SEQ ID NO: 17633 - DNA, 21 bp, Homo sapiens
tctagtctaayctactacctc

SEQ ID NO: 17634 - DNA, 21 bp, Homo sapiens
gtgggcgatayctttctaagg

SEQ ID NO: 17635 - DNA, 21 bp, Homo sapiens
gtgtacaaagyacattctgca

SEQ ID NO: 17636 - DNA, 21 bp, Homo sapiens
tggtttgtgcrtcaaaatgct

SEQ ID NO: 17637 - DNA, 21 bp, Homo sapiens
ggttggggtcrgggatgttgc

SEQ ID NO: 17638 - DNA, 21 bp, Homo sapiens
ttacacagcaycgtcatagag

SEQ ID NO: 17639 - DNA, 21 bp, Homo sapiens
cttttgccttrtaaaacttta

SEQ ID NO: 17640 - DNA, 21 bp, Homo sapiens
ttcgtggtttrtttgctgtgg

SEQ ID NO: 17641 - DNA, 21 bp, Homo sapiens
cataaacaagraggaactaaa

SEQ ID NO: 17642 - DNA, 21 bp, Homo sapiens
ataatatgccrtatcaagtga

SEQ ID NO: 17643 - DNA, 21 bp, Homo sapiens
ctgttctgttrccaatccact

SEQ ID NO: 17644 - DNA, 21 bp, Homo sapiens
gtggggaagayggagttaaaa

SEQ ID NO: 17645 - DNA, 21 bp, Homo sapiens
acaatccttcrgtcccacagg

SEQ ID NO: 17646 - DNA, 21 bp, Homo sapiens
attccttgagygaatctcatg

SEQ ID NO: 17647 - DNA, 21 bp, Homo sapiens
actcttttccrtccacccaca

SEQ ID NO: 17648 - DNA, 21 bp, Homo sapiens
acaatgattgmcctaaagaga

SEQ ID NO: 17649 - DNA, 21 bp, Homo sapiens
gatcctgaacrtataagtacc

SEQ ID NO: 17650 - DNA, 21 bp, Homo sapiens
ggtgcccatayagcacctttg

SEQ ID NO: 17651 - DNA, 21 bp, Homo sapiens
acactgtccarattcctgtgg

SEQ ID NO: 17652 - DNA, 21 bp, Homo sapiens
acaaccaatcrgtcagggtta

SEQ ID NO: 17653 - DNA, 21 bp, Homo sapiens
gaaagataggkcctaaaaagg

SEQ ID NO: 17654 - DNA, 21 bp, Homo sapiens
tgccgtaaagrggaagtcacc

SEQ ID NO: 17655 - DNA, 21 bp, Homo sapiens
atttttagtcyttttttcaca

SEQ ID NO: 17656 - DNA, 21 bp, Homo sapiens
agagctcaaaytggtgagaga

SEQ ID NO: 17657 - DNA, 21 bp, Homo sapiens
ggtgagagatraaattggagt

SEQ ID NO: 17658 - DNA, 21 bp, Homo sapiens
tgtcagagtcrgataaaatgt

SEQ ID NO: 17659 - DNA, 21 bp, Homo sapiens
tacctataaargtgaggatgt

SEQ ID NO: 17660 - DNA, 21 bp, Homo sapiens
agattgaaatrctatgcagat

SEQ ID NO: 17661 - DNA, 21 bp, Homo sapiens
caatagaagcracatgcataa

SEQ ID NO: 17662 - DNA, 21 bp, Homo sapiens
cgcgcccacckcttgggttct

SEQ ID NO: 17663 - DNA, 21 bp, Homo sapiens
tccgcagcccrgacctgcgct

SEQ ID NO: 17664 - DNA, 21 bp, Homo sapiens
aaagccttctytagaaaataa

SEQ ID NO: 17665 - DNA, 21 bp, Homo sapiens
tgcatatgttraactaagaag

SEQ ID NO: 17666 - DNA, 21 bp, Homo sapiens
ataaactggcragactaaatc

SEQ ID NO: 17667 - DNA, 21 bp, Homo sapiens
tgctgttatartagcctgaat

SEQ ID NO: 17668 - DNA, 21 bp, Homo sapiens
ttacacctgcratgtgattgg

SEQ ID NO: 17669 - DNA, 21 bp, Homo sapiens
atgttctcccracattctttc

SEQ ID NO: 17670 - DNA, 21 bp, Homo sapiens
atttgagatcrgacctgtcta

SEQ ID NO: 17671 - DNA, 21 bp, Homo sapiens
tttacaatacmccgtagtgca

SEQ ID NO: 17672 - DNA, 21 bp, Homo sapiens
ctctctgcacrtgctctagag

SEQ ID NO: 17673 - DNA, 21 bp, Homo sapiens
ggctttttctrtttacctcca

SEQ ID NO: 17674 - DNA, 21 bp, Homo sapiens
gcccattatakaactatacta

SEQ ID NO: 17675 - DNA, 21 bp, Homo sapiens
gttgggaacayatgtccatag

SEQ ID NO: 17676 - DNA, 21 bp, Homo sapiens
caaaatcaatyatattatgta

SEQ ID NO: 17677 - DNA, 21 bp, Homo sapiens
ttatgtgtcartaaagcttgg

SEQ ID NO: 17678 - DNA, 21 bp, Homo sapiens
ctctcaactgygttctccttc

SEQ ID NO: 17679 - DNA, 21 bp, Homo sapiens
agttttcttaygcacacacag

SEQ ID NO: 17680 - DNA, 21 bp, Homo sapiens
tggagaggggrgtataatgat

SEQ ID NO: 17681 - DNA, 21 bp, Homo sapiens
aaagtgcaggrctaactagta

SEQ ID NO: 17682 - DNA, 21 bp, Homo sapiens
ctaaactcacrcagaaattga

SEQ ID NO: 17683 - DNA, 21 bp, Homo sapiens
tgagttgatgyattttcaaac

SEQ ID NO: 17684 - DNA, 21 bp, Homo sapiens
gaaaaaggctrcttatcatga

SEQ ID NO: 17685 - DNA, 21 bp, Homo sapiens
ttttaatatgmgaattctacc

SEQ ID NO: 17686 - DNA, 21 bp, Homo sapiens
ggtccagaatkgctttgcagg

SEQ ID NO: 17687 - DNA, 21 bp, Homo sapiens
gcccttggatrgtgctcagta

SEQ ID NO: 17688 - DNA, 21 bp, Homo sapiens
atggtgttgarcagtggtttg

SEQ ID NO: 17689 - DNA, 21 bp, Homo sapiens
ggcttagctayagaagggtcc

SEQ ID NO: 17690 - DNA, 21 bp, Homo sapiens
catagcacacraaaagatgtt

SEQ ID NO: 17691 - DNA, 21 bp, Homo sapiens
ataatgcattygaaattcatt

SEQ ID NO: 17692 - DNA, 21 bp, Homo sapiens
ctgaggacttycatattccac

SEQ ID NO: 17693 - DNA, 21 bp, Homo sapiens
gtaagaagaamcttgagactt

SEQ ID NO: 17694 - DNA, 21 bp, Homo sapiens
tacatttccargcatttagac

SEQ ID NO: 17695 - DNA, 21 bp, Homo sapiens
atggacacttrgaatggggtg

SEQ ID NO: 17696 - DNA, 21 bp, Homo sapiens
gtatctgctgycaaatagctg

SEQ ID NO: 17697 - DNA, 21 bp, Homo sapiens
gggtcagcttraccaacacct

SEQ ID NO: 17698 - DNA, 21 bp, Homo sapiens
tttagagtgamgcgctcatag

SEQ ID NO: 17699 - DNA, 21 bp, Homo sapiens
aatcgccaccktccattgctc

SEQ ID NO: 17700 - DNA, 21 bp, Homo sapiens
gcccagcgacytccgggatca

SEQ ID NO: 17701 - DNA, 21 bp, Homo sapiens
accatctgttmactgtttctg

SEQ ID NO: 17702 - DNA, 21 bp, Homo sapiens
ctagagacgtrgagatatcta

SEQ ID NO: 17703 - DNA, 21 bp, Homo sapiens
tctgtagctaygtaagatagc

SEQ ID NO: 17704 - DNA, 21 bp, Homo sapiens
agtcctccatracccaattgg

SEQ ID NO: 17705 - DNA, 21 bp, Homo sapiens
ctcataatttrgcttcccagg

SEQ ID NO: 17706 - DNA, 21 bp, Homo sapiens
taacggatggmtacattcata

SEQ ID NO: 17707 - DNA, 21 bp, Homo sapiens
acgtgatgctrtgcaaaggct

SEQ ID NO: 17708 - DNA, 21 bp, Homo sapiens
agaagccttcrctgaccaggt

SEQ ID NO: 17709 - DNA, 21 bp, Homo sapiens
atcatattgtytttccagtga

SEQ ID NO: 17710 - DNA, 21 bp, Homo sapiens
tttactcaaaygtttccacat

SEQ ID NO: 17711 - DNA, 21 bp, Homo sapiens
ttccccagaamcagaagttgc

SEQ ID NO: 17712 - DNA, 21 bp, Homo sapiens
ttcacactttyacttcaaacc

SEQ ID NO: 17713 - DNA, 21 bp, Homo sapiens
atattgtttayactgtattag

SEQ ID NO: 17714 - DNA, 21 bp, Homo sapiens
tgcatgtagtrttatgtaact

SEQ ID NO: 17715 - DNA, 21 bp, Homo sapiens
agagcttagtrtattttcttt

SEQ ID NO: 17716 - DNA, 21 bp, Homo sapiens
gtcgtgtattmtttaaccaca

SEQ ID NO: 17717 - DNA, 21 bp, Homo sapiens
aaattgtccartgatgcttcc

SEQ ID NO: 17718 - DNA, 21 bp, Homo sapiens
caagaatggaratgaaatgca

SEQ ID NO: 17719 - DNA, 21 bp, Homo sapiens
tagcgttgtcrctcactgatt

SEQ ID NO: 17720 - DNA, 21 bp, Homo sapiens
tacacactttycacaaccccc

SEQ ID NO: 17721 - DNA, 21 bp, Homo sapiens
agaacaagaaracataaatgg

SEQ ID NO: 17722 - DNA, 21 bp, Homo sapiens
gtgccagcacygttctagttg

SEQ ID NO: 17723 - DNA, 21 bp, Homo sapiens
taatgtaaacygtcttctaac

SEQ ID NO: 17724 - DNA, 21 bp, Homo sapiens
agaaggtcccyaatcacctct

SEQ ID NO: 17725 - DNA, 21 bp, Homo sapiens
ttaacacactraactgtacac

SEQ ID NO: 17726 - DNA, 21 bp, Homo sapiens
acatatgcctrtagtgtgttt

SEQ ID NO: 17727 - DNA, 21 bp, Homo sapiens
cgaattgaacrctacccaaca

SEQ ID NO: 17728 - DNA, 21 bp, Homo sapiens
gctgagggccratccacaagc

SEQ ID NO: 17729 - DNA, 21 bp, Homo sapiens
ttgaatgctgyatagtcttga

SEQ ID NO: 17730 - DNA, 21 bp, Homo sapiens
aatagtaaccrtgtatgataa

SEQ ID NO: 17731 - DNA, 21 bp, Homo sapiens
ccacttcctcrttaatcctca

SEQ ID NO: 17732 - DNA, 21 bp, Homo sapiens
gtgtgtgtgtyggaacatcaa

SEQ ID NO: 17733 - DNA, 21 bp, Homo sapiens
aatgaactaayacaatactca

SEQ ID NO: 17734 - DNA, 21 bp, Homo sapiens
gctgacaaggygaacaggaag

SEQ ID NO: 17735 - DNA, 21 bp, Homo sapiens
tagtccttaartaacagaaat

SEQ ID NO: 17736 - DNA, 21 bp, Homo sapiens
tggtccttatyattccctcac

SEQ ID NO: 17737 - DNA, 21 bp, Homo sapiens
ctattttaaayaccatcttct

SEQ ID NO: 17738 - DNA, 21 bp, Homo sapiens
ttttcatctgyacccttagtg

SEQ ID NO: 17739 - DNA, 21 bp, Homo sapiens
tagacaactayacgacctatc

SEQ ID NO: 17740 - DNA, 21 bp, Homo sapiens
ccaagaaagaygaagtggaat

SEQ ID NO: 17741 - DNA, 21 bp, Homo sapiens
ggagaaaagtrtcagctcagt

SEQ ID NO: 17742 - DNA, 21 bp, Homo sapiens
gagtcaggaarctatcagaaa

SEQ ID NO: 17743 - DNA, 21 bp, Homo sapiens
gttttacaagraagtgtgttc

SEQ ID NO: 17744 - DNA, 21 bp, Homo sapiens
aaagctagtgrccattcatat

SEQ ID NO: 17745 - DNA, 21 bp, Homo sapiens
ctcccaggtcycattttgtaa

SEQ ID NO: 17746 - DNA, 21 bp, Homo sapiens
agccacccctraagaagcagc

SEQ ID NO: 17747 - DNA, 21 bp, Homo sapiens
tgatgagtttktagatgcaaa

SEQ ID NO: 17748 - DNA, 21 bp, Homo sapiens
ctttataggtrcaactctaga

SEQ ID NO: 17749 - DNA, 21 bp, Homo sapiens
atttaacagaytttatctgaa

SEQ ID NO: 17750 - DNA, 21 bp, Homo sapiens
catggtccagrttctgccctc

SEQ ID NO: 17751 - DNA, 21 bp, Homo sapiens
tggaatcaaakgatcccattt

SEQ ID NO: 17752 - DNA, 21 bp, Homo sapiens
agaaaacaatrttggtatggg

SEQ ID NO: 17753 - DNA, 21 bp, Homo sapiens
tgtacaacaaygaggtctgac

SEQ ID NO: 17754 - DNA, 21 bp, Homo sapiens
gatgcatacaygtcacacttc

SEQ ID NO: 17755 - DNA, 21 bp, Homo sapiens
aagaactgagrgaattttgaa

SEQ ID NO: 17756 - DNA, 21 bp, Homo sapiens
ccccaaacctyacaacttctc

SEQ ID NO: 17757 - DNA, 21 bp, Homo sapiens
ttgtgtcagcygtatgaaacc

SEQ ID NO: 17758 - DNA, 21 bp, Homo sapiens
agatccacgcyctctgtgctg

SEQ ID NO: 17759 - DNA, 21 bp, Homo sapiens
atctgttattyggtcagagtc

SEQ ID NO: 17760 - DNA, 21 bp, Homo sapiens
aagattagaaytaggtgccat

SEQ ID NO: 17761 - DNA, 21 bp, Homo sapiens
ttttaaaaggytcactgttga

SEQ ID NO: 17762 - DNA, 21 bp, Homo sapiens
gccaaacatayatccaccaga

SEQ ID NO: 17763 - DNA, 21 bp, Homo sapiens
aagttttccaktaactgagga

SEQ ID NO: 17764 - DNA, 21 bp, Homo sapiens
gggggaggaakgtgataaggg

SEQ ID NO: 17765 - DNA, 21 bp, Homo sapiens
catttggtaargcaagtctac

SEQ ID NO: 17766 - DNA, 21 bp, Homo sapiens
ctgtttaagtrctcactgtca

SEQ ID NO: 17767 - DNA, 21 bp, Homo sapiens
aaagaaatccractgctagcc

SEQ ID NO: 17768 - DNA, 21 bp, Homo sapiens
tggttgttttrgctttccctg

SEQ ID NO: 17769 - DNA, 21 bp, Homo sapiens
taaatgatagygtgaatctta

SEQ ID NO: 17770 - DNA, 21 bp, Homo sapiens
agccaaaaaarcttttactag

SEQ ID NO: 17771 - DNA, 21 bp, Homo sapiens
agtctctaagkgccacatgac

SEQ ID NO: 17772 - DNA, 21 bp, Homo sapiens
aattctcagaraggcaggatg

SEQ ID NO: 17773 - DNA, 21 bp, Homo sapiens
atttcatagtrttttacaact

SEQ ID NO: 17774 - DNA, 21 bp, Homo sapiens
aacaaagtgargaggcagaag

SEQ ID NO: 17775 - DNA, 21 bp, Homo sapiens
cgctagcttayctggttttct

SEQ ID NO: 17776 - DNA, 21 bp, Homo sapiens
ggactagactrgattcccaga

SEQ ID NO: 17777 - DNA, 21 bp, Homo sapiens
tctgactctaycctcaatgaa

SEQ ID NO: 17778 - DNA, 21 bp, Homo sapiens
gcatctatgargcagaaatca

SEQ ID NO: 17779 - DNA, 21 bp, Homo sapiens
cattgagagcyagatacagat

SEQ ID NO: 17780 - DNA, 21 bp, Homo sapiens
cctctgattcrtttcagggcg

SEQ ID NO: 17781 - DNA, 21 bp, Homo sapiens
ctgtgatttamagactcatgt

SEQ ID NO: 17782 - DNA, 21 bp, Homo sapiens
tgcttagttarcacaaaggct

SEQ ID NO: 17783 - DNA, 21 bp, Homo sapiens
tttatactgartagtgttttc

SEQ ID NO: 17784 - DNA, 21 bp, Homo sapiens
ctgagttaggytctttcattt

SEQ ID NO: 17785 - DNA, 21 bp, Homo sapiens
attttcattgyagagatcttt

SEQ ID NO: 17786 - DNA, 21 bp, Homo sapiens
atgtgtacacraacaatgact

SEQ ID NO: 17787 - DNA, 21 bp, Homo sapiens
gggggctatgrtctgtagttt

SEQ ID NO: 17788 - DNA, 21 bp, Homo sapiens
ggggttacacktacataagca

SEQ ID NO: 17789 - DNA, 21 bp, Homo sapiens
atttgtgcttkgcgtttgttt

SEQ ID NO: 17790 - DNA, 21 bp, Homo sapiens
cctttcctatygcaggaggtt

SEQ ID NO: 17791 - DNA, 21 bp, Homo sapiens
ctctcctgtgyaaatgttcct

SEQ ID NO: 17792 - DNA, 21 bp, Homo sapiens
aaatattgctrtgggttgaat

SEQ ID NO: 17793 - DNA, 21 bp, Homo sapiens
gtgctagaaayaaggcggtct

SEQ ID NO: 17794 - DNA, 21 bp, Homo sapiens
tatccttatckaatggaacaa

SEQ ID NO: 17795 - DNA, 21 bp, Homo sapiens
tataaagagcytagagcctgt

SEQ ID NO: 17796 - DNA, 21 bp, Homo sapiens
aaaatctagcragggtgacaa

SEQ ID NO: 17797 - DNA, 21 bp, Homo sapiens
acccaaagcayagtctcctat

SEQ ID NO: 17798 - DNA, 21 bp, Homo sapiens
tttcctgtccrggatccccat

SEQ ID NO: 17799 - DNA, 21 bp, Homo sapiens
ccttgattccrgaaaacaaat

SEQ ID NO: 17800 - DNA, 21 bp, Homo sapiens
acatgactcayattgaagcct

SEQ ID NO: 17801 - DNA, 21 bp, Homo sapiens
tataggtatgycaagcaaaga

SEQ ID NO: 17802 - DNA, 21 bp, Homo sapiens
ctacagatagraatgtaaaat

SEQ ID NO: 17803 - DNA, 21 bp, Homo sapiens
tgcaatgattrtggatacact

SEQ ID NO: 17804 - DNA, 21 bp, Homo sapiens
cacagagctgmattgcagtcc

SEQ ID NO: 17805 - DNA, 21 bp, Homo sapiens
tggaggtctgrctgtaaggtg

SEQ ID NO: 17806 - DNA, 21 bp, Homo sapiens
ctatatgctaygtttatatgt

SEQ ID NO: 17807 - DNA, 21 bp, Homo sapiens
cagctcccaaytgccttaaca

SEQ ID NO: 17808 - DNA, 21 bp, Homo sapiens
tgaactgagcmgaagctttta

SEQ ID NO: 17809 - DNA, 21 bp, Homo sapiens
agaatgtggtrtgaatgggag

SEQ ID NO: 17810 - DNA, 21 bp, Homo sapiens
tcattttacartttccaacac

SEQ ID NO: 17811 - DNA, 21 bp, Homo sapiens
actggttactygctgatctct

SEQ ID NO: 17812 - DNA, 21 bp, Homo sapiens
tttttccccaygttaagtctg

SEQ ID NO: 17813 - DNA, 21 bp, Homo sapiens
gagccccctgmcaggcgcctg

SEQ ID NO: 17814 - DNA, 21 bp, Homo sapiens
gcaggcatatrcaaattattt

SEQ ID NO: 17815 - DNA, 21 bp, Homo sapiens
cctggtaacaygtgggaggca

SEQ ID NO: 17816 - DNA, 21 bp, Homo sapiens
ttctacattcytggtactggt

SEQ ID NO: 17817 - DNA, 21 bp, Homo sapiens
taaaagcagaygtccttttgt

SEQ ID NO: 17818 - DNA, 21 bp, Homo sapiens
taagcagagtrtattgccttg

SEQ ID NO: 17819 - DNA, 21 bp, Homo sapiens
ttttcagaatrctcatttgtt

SEQ ID NO: 17820 - DNA, 21 bp, Homo sapiens
gactacagccrtgaaccacag

SEQ ID NO: 17821 - DNA, 21 bp, Homo sapiens
tcctgacttcytcctgccaaa

SEQ ID NO: 17822 - DNA, 21 bp, Homo sapiens
agtgtcaggcygcttggtgaa

SEQ ID NO: 17823 - DNA, 21 bp, Homo sapiens
tcctgcatccyaggattggct

SEQ ID NO: 17824 - DNA, 21 bp, Homo sapiens
ctgaaaagttrcaactacaga

SEQ ID NO: 17825 - DNA, 21 bp, Homo sapiens
ggaacacaggygcagggggtg

SEQ ID NO: 17826 - DNA, 21 bp, Homo sapiens
aaggggccacrgtgaggcaga

SEQ ID NO: 17827 - DNA, 21 bp, Homo sapiens
gtatggctccrgttttcctac

SEQ ID NO: 17828 - DNA, 21 bp, Homo sapiens
acatttctgcrtttaaaaaaa

SEQ ID NO: 17829 - DNA, 21 bp, Homo sapiens
ttcaaatgctyccaccattct

SEQ ID NO: 17830 - DNA, 21 bp, Homo sapiens
gtttttccacygagttgtctt

SEQ ID NO: 17831 - DNA, 21 bp, Homo sapiens
ctttaaaatgygagagggtac

SEQ ID NO: 17832 - DNA, 21 bp, Homo sapiens
gcagttttcamaccactataa

SEQ ID NO: 17833 - DNA, 21 bp, Homo sapiens
gtcaacttaarcagtaggaga

SEQ ID NO: 17834 - DNA, 21 bp, Homo sapiens
tggagctattyacgggaagca

SEQ ID NO: 17835 - DNA, 21 bp, Homo sapiens
ccttttaggtytgtttaggta

SEQ ID NO: 17836 - DNA, 21 bp, Homo sapiens
tgctgcagggrtagatatacc

SEQ ID NO: 17837 - DNA, 21 bp, Homo sapiens
aatataatttratgtatttta

SEQ ID NO: 17838 - DNA, 21 bp, Homo sapiens
gcagtattgtrccaatgttaa

SEQ ID NO: 17839 - DNA, 21 bp, Homo sapiens
atgaccttacragtgaacatc

SEQ ID NO: 17840 - DNA, 21 bp, Homo sapiens
atgatctttaycatttcgagg

SEQ ID NO: 17841 - DNA, 21 bp, Homo sapiens
taatttttacrtctatgttta

SEQ ID NO: 17842 - DNA, 21 bp, Homo sapiens
tgcttgccccrctacagtcag

SEQ ID NO: 17843 - DNA, 21 bp, Homo sapiens
cagactgttcygttatacctg

SEQ ID NO: 17844 - DNA, 21 bp, Homo sapiens
cttaaaaatgrgatgtacttc

SEQ ID NO: 17845 - DNA, 21 bp, Homo sapiens
aaaggatgccratgctacctg

SEQ ID NO: 17846 - DNA, 21 bp, Homo sapiens
acttgtgagakccaattttgt

SEQ ID NO: 17847 - DNA, 21 bp, Homo sapiens
aatttacaaaygccgcacgtt

SEQ ID NO: 17848 - DNA, 21 bp, Homo sapiens
gtgattaaackatgtaaccta

SEQ ID NO: 17849 - DNA, 21 bp, Homo sapiens
tactgatgatycttgcccttg

SEQ ID NO: 17850 - DNA, 21 bp, Homo sapiens
aatatgactcrttcgcaggaa

SEQ ID NO: 17851 - DNA, 21 bp, Homo sapiens
ctgcagccaargataatggga

SEQ ID NO: 17852 - DNA, 21 bp, Homo sapiens
gcgatatgctrcctgaagaaa

SEQ ID NO: 17853 - DNA, 21 bp, Homo sapiens
tccttcatatragccaatatc

SEQ ID NO: 17854 - DNA, 21 bp, Homo sapiens
tcataaccccygtcgagagcc

SEQ ID NO: 17855 - DNA, 21 bp, Homo sapiens
tatttttcttyaggggttcca

SEQ ID NO: 17856 - DNA, 21 bp, Homo sapiens
tgtacggtccytggatcccag

SEQ ID NO: 17857 - DNA, 21 bp, Homo sapiens
cttcacatcgyttttctctga

SEQ ID NO: 17858 - DNA, 21 bp, Homo sapiens
ttctaaatatkctgtttgatt

SEQ ID NO: 17859 - DNA, 21 bp, Homo sapiens
gaatacttgaygaatgtcaaa

SEQ ID NO: 17860 - DNA, 21 bp, Homo sapiens
tttcttcagcrtatttacaac

SEQ ID NO: 17861 - DNA, 21 bp, Homo sapiens
ggtcctgggcrttggtcaagg

SEQ ID NO: 17862 - DNA, 21 bp, Homo sapiens
ttggttattcygaggtataaa

SEQ ID NO: 17863 - DNA, 21 bp, Homo sapiens
tcagtttatayagaaaaggca

SEQ ID NO: 17864 - DNA, 21 bp, Homo sapiens
attataagtcrggtaatatga

SEQ ID NO: 17865 - DNA, 21 bp, Homo sapiens
gtactcccgtyttgaggggga

SEQ ID NO: 17866 - DNA, 21 bp, Homo sapiens
ataaaatattrgagtcaacag

SEQ ID NO: 17867 - DNA, 21 bp, Homo sapiens
cagatagctgrttcaaaaaat

SEQ ID NO: 17868 - DNA, 21 bp, Homo sapiens
tttattattaygcattataat

SEQ ID NO: 17869 - DNA, 21 bp, Homo sapiens
tatcttgactktgtcaccaac

SEQ ID NO: 17870 - DNA, 21 bp, Homo sapiens
ccttgctaacyttttaaagat

SEQ ID NO: 17871 - DNA, 21 bp, Homo sapiens
tccattgactraattacctgc

SEQ ID NO: 17872 - DNA, 21 bp, Homo sapiens
agccaactcaycagtcatcaa

SEQ ID NO: 17873 - DNA, 21 bp, Homo sapiens
aatctttacaratgatatgaa

SEQ ID NO: 17874 - DNA, 21 bp, Homo sapiens
agtaagaataygcaacattga

SEQ ID NO: 17875 - DNA, 21 bp, Homo sapiens
tactgttctcratatgcaatt

SEQ ID NO: 17876 - DNA, 21 bp, Homo sapiens
taacaaagtgygtggcacaca

SEQ ID NO: 17877 - DNA, 21 bp, Homo sapiens
agttataagayatgaaagatg

SEQ ID NO: 17878 - DNA, 21 bp, Homo sapiens
catttcctatytgttcccaat

SEQ ID NO: 17879 - DNA, 21 bp, Homo sapiens
cttggcttcgyttatgtccaa

SEQ ID NO: 17880 - DNA, 21 bp, Homo sapiens
catgtattgcrtgtgaggatg

SEQ ID NO: 17881 - DNA, 21 bp, Homo sapiens
caggtatggcraaatccatca

SEQ ID NO: 17882 - DNA, 21 bp, Homo sapiens
gtagctgcagytttctgattt

SEQ ID NO: 17883 - DNA, 21 bp, Homo sapiens
tgacatgtagygaagctacta

SEQ ID NO: 17884 - DNA, 21 bp, Homo sapiens
atcttacctayttcaatggct

SEQ ID NO: 17885 - DNA, 21 bp, Homo sapiens
cttggtcccamatcagggctt

SEQ ID NO: 17886 - DNA, 21 bp, Homo sapiens
atgataagccrgccttcattc

SEQ ID NO: 17887 - DNA, 21 bp, Homo sapiens
gtcatgaaaayagacaaggac

SEQ ID NO: 17888 - DNA, 21 bp, Homo sapiens
actgcaatgtratgtcgtaac

SEQ ID NO: 17889 - DNA, 21 bp, Homo sapiens
atcctctctcyctggagactg

SEQ ID NO: 17890 - DNA, 21 bp, Homo sapiens
tagaaattgakgcaagagctt

SEQ ID NO: 17891 - DNA, 21 bp, Homo sapiens
atggcagttarggcccagtct

SEQ ID NO: 17892 - DNA, 21 bp, Homo sapiens
catcagctttrggaagttatc

SEQ ID NO: 17893 - DNA, 21 bp, Homo sapiens
tcttgttatargtaggtagca

SEQ ID NO: 17894 - DNA, 21 bp, Homo sapiens
attttcttttygaaagaccta

SEQ ID NO: 17895 - DNA, 21 bp, Homo sapiens
cacctcaccckttactaagta

SEQ ID NO: 17896 - DNA, 21 bp, Homo sapiens
tctcaaagacrgacgtaatgc

SEQ ID NO: 17897 - DNA, 21 bp, Homo sapiens
ctggccaggcytaaaagtaaa

SEQ ID NO: 17898 - DNA, 21 bp, Homo sapiens
ttttctgtctrataaagcaag

SEQ ID NO: 17899 - DNA, 21 bp, Homo sapiens
atgtttccacrtgtatcctac

SEQ ID NO: 17900 - DNA, 21 bp, Homo sapiens
atcctctcacrgtggacagaa

SEQ ID NO: 17901 - DNA, 21 bp, Homo sapiens
gaatcagatgyttgccagaca

SEQ ID NO: 17902 - DNA, 21 bp, Homo sapiens
tgagaaagacrgcaagtctga

SEQ ID NO: 17903 - DNA, 21 bp, Homo sapiens
ttatgtgctgyagaaaaagta

SEQ ID NO: 17904 - DNA, 21 bp, Homo sapiens
tgtatttctayaaatatcttc

SEQ ID NO: 17905 - DNA, 21 bp, Homo sapiens
cctgttgaggkatacatttgt

SEQ ID NO: 17906 - DNA, 21 bp, Homo sapiens
gaaatggaacrcagaaagctt

SEQ ID NO: 17907 - DNA, 21 bp, Homo sapiens
gacctaagttrtgactcataa

SEQ ID NO: 17908 - DNA, 21 bp, Homo sapiens
ctcctaaattmtttttataaa

SEQ ID NO: 17909 - DNA, 21 bp, Homo sapiens
aaagatatcarcaaagtacat

SEQ ID NO: 17910 - DNA, 21 bp, Homo sapiens
tgataatcacrgctgattttt

SEQ ID NO: 17911 - DNA, 21 bp, Homo sapiens
agtacagtggraatgtaccgt

SEQ ID NO: 17912 - DNA, 21 bp, Homo sapiens
ctgttttgatrtctcttttca

SEQ ID NO: 17913 - DNA, 21 bp, Homo sapiens
aaatttgtgaytggggcaagg

SEQ ID NO: 17914 - DNA, 21 bp, Homo sapiens
tatatttccaytcttgtactt

SEQ ID NO: 17915 - DNA, 21 bp, Homo sapiens
acagtacactytgtctcctgc

SEQ ID NO: 17916 - DNA, 21 bp, Homo sapiens
gttggtccgtrtaacagagat

SEQ ID NO: 17917 - DNA, 21 bp, Homo sapiens
gtggagtgcargtagtaggta

SEQ ID NO: 17918 - DNA, 21 bp, Homo sapiens
ataaatcagcmtgttctcacg

SEQ ID NO: 17919 - DNA, 21 bp, Homo sapiens
gtttgttgctrtgaggacttg

SEQ ID NO: 17920 - DNA, 21 bp, Homo sapiens
ttccaaagttyccaaaacttt

SEQ ID NO: 17921 - DNA, 21 bp, Homo sapiens
aaaactggctygagtccaaaa

SEQ ID NO: 17922 - DNA, 21 bp, Homo sapiens
agcctcactcrttgtgggcca

SEQ ID NO: 17923 - DNA, 21 bp, Homo sapiens
actcatcataragactactca

SEQ ID NO: 17924 - DNA, 21 bp, Homo sapiens
tcatatgaacrgcagtttttt

SEQ ID NO: 17925 - DNA, 21 bp, Homo sapiens
gtaagtcaaakgtgaatgaac

SEQ ID NO: 17926 - DNA, 21 bp, Homo sapiens
ctgggggggaygccaatctgt

SEQ ID NO: 17927 - DNA, 21 bp, Homo sapiens
ttgaatgtggmgagcatcagg

SEQ ID NO: 17928 - DNA, 21 bp, Homo sapiens
atttcaaaatytccctaaccc

SEQ ID NO: 17929 - DNA, 21 bp, Homo sapiens
ttccaaaatcyattgatcatt

SEQ ID NO: 17930 - DNA, 21 bp, Homo sapiens
gttagtcaagrtgcaatgaga

SEQ ID NO: 17931 - DNA, 21 bp, Homo sapiens
tcaagactatyaccagttcta

SEQ ID NO: 17932 - DNA, 21 bp, Homo sapiens
tgttacagttkcaacaaaggc

SEQ ID NO: 17933 - DNA, 21 bp, Homo sapiens
ctgccagcccytggtgttcca

SEQ ID NO: 17934 - DNA, 21 bp, Homo sapiens
gtacaaagtargcagtctgac

SEQ ID NO: 17935 - DNA, 21 bp, Homo sapiens
gactggctgtraggctgatta

SEQ ID NO: 17936 - DNA, 21 bp, Homo sapiens
ttcatgccctrtggtaggttc

SEQ ID NO: 17937 - DNA, 21 bp, Homo sapiens
cccatgaaagkctctgcctgg

SEQ ID NO: 17938 - DNA, 21 bp, Homo sapiens
ctggaaaatamaatcaaccac

SEQ ID NO: 17939 - DNA, 21 bp, Homo sapiens
tacacttagcygagttctgca

SEQ ID NO: 17940 - DNA, 21 bp, Homo sapiens
tttttcagaaygggaaatgtt

SEQ ID NO: 17941 - DNA, 21 bp, Homo sapiens
cttggacacaygcacacaaaa

SEQ ID NO: 17942 - DNA, 21 bp, Homo sapiens
atatggaaatrtgacttattt

SEQ ID NO: 17943 - DNA, 21 bp, Homo sapiens
aatattatackctcattaagt

SEQ ID NO: 17944 - DNA, 21 bp, Homo sapiens
caggtggggtrgactgtgccc

SEQ ID NO: 17945 - DNA, 21 bp, Homo sapiens
cagctgcctckgaagccacct

SEQ ID NO: 17946 - DNA, 21 bp, Homo sapiens
acaaagatcarcttccttggg

SEQ ID NO: 17947 - DNA, 21 bp, Homo sapiens
atctcttaggrtgagctttat

SEQ ID NO: 17948 - DNA, 21 bp, Homo sapiens
cttagagactrggaatttggt

SEQ ID NO: 17949 - DNA, 21 bp, Homo sapiens
aatcaaagcamcatggatatg

SEQ ID NO: 17950 - DNA, 21 bp, Homo sapiens
tattgcactaytggggttgtg

SEQ ID NO: 17951 - DNA, 21 bp, Homo sapiens
ctgctctgatraatctcaaca

SEQ ID NO: 17952 - DNA, 21 bp, Homo sapiens
ctggacaggcrttcaaattct

SEQ ID NO: 17953 - DNA, 21 bp, Homo sapiens
tctcactcagrcagcatctta

SEQ ID NO: 17954 - DNA, 21 bp, Homo sapiens
gacagtggtgkcactcagccc

SEQ ID NO: 17955 - DNA, 21 bp, Homo sapiens
cctaaggtggytgaacatctg

SEQ ID NO: 17956 - DNA, 21 bp, Homo sapiens
gttgcctactrtgataaatgt

SEQ ID NO: 17957 - DNA, 21 bp, Homo sapiens
gattgtttgartattttgtgt

SEQ ID NO: 17958 - DNA, 21 bp, Homo sapiens
ctaaatatgcycatcttaact

SEQ ID NO: 17959 - DNA, 21 bp, Homo sapiens
gctggtatcayataatcaaaa

SEQ ID NO: 17960 - DNA, 21 bp, Homo sapiens
gaatagggaaytaatcctttc

SEQ ID NO: 17961 - DNA, 21 bp, Homo sapiens
gattctggtgrtgattacaag

SEQ ID NO: 17962 - DNA, 21 bp, Homo sapiens
ggactgagtakaaagatcaat

SEQ ID NO: 17963 - DNA, 21 bp, Homo sapiens
actcttaaccmgcacattagt

SEQ ID NO: 17964 - DNA, 21 bp, Homo sapiens
tacatcaatcyggaaatacaa

SEQ ID NO: 17965 - DNA, 21 bp, Homo sapiens
tatggaattartatagaatgc

SEQ ID NO: 17966 - DNA, 21 bp, Homo sapiens
aacatattccytggaaacaat

SEQ ID NO: 17967 - DNA, 21 bp, Homo sapiens
gcttaaacatyattgagagat

SEQ ID NO: 17968 - DNA, 21 bp, Homo sapiens
aaaaaattgtytagttaatag

SEQ ID NO: 17969 - DNA, 21 bp, Homo sapiens
atgagacagaygtaacaacag

SEQ ID NO: 17970 - DNA, 21 bp, Homo sapiens
cacgtgcaccrttggatgcag

SEQ ID NO: 17971 - DNA, 21 bp, Homo sapiens
tactccctggycccccaaaat

SEQ ID NO: 17972 - DNA, 21 bp, Homo sapiens
agactagcctygttcccatcc

SEQ ID NO: 17973 - DNA, 21 bp, Homo sapiens
aatttgatgcktgtccaaagt

SEQ ID NO: 17974 - DNA, 21 bp, Homo sapiens
gatgctataamattttttaac

SEQ ID NO: 17975 - DNA, 21 bp, Homo sapiens
cgttttaatarcagccattct

SEQ ID NO: 17976 - DNA, 21 bp, Homo sapiens
cgtgggtgggktgctgagccc

SEQ ID NO: 17977 - DNA, 21 bp, Homo sapiens
acacaatcggrctcaagaagc

SEQ ID NO: 17978 - DNA, 21 bp, Homo sapiens
ctcaactgggmcaggtcaaga

SEQ ID NO: 17979 - DNA, 21 bp, Homo sapiens
tgtttccatcragcaatagct

SEQ ID NO: 17980 - DNA, 21 bp, Homo sapiens
ggcttgaggtygtgttttaca

SEQ ID NO: 17981 - DNA, 21 bp, Homo sapiens
aataatttcaycaccctaaaa

SEQ ID NO: 17982 - DNA, 21 bp, Homo sapiens
cactttccttygtatcacttt

SEQ ID NO: 17983 - DNA, 21 bp, Homo sapiens
ataaatcccayaaattgctgc

SEQ ID NO: 17984 - DNA, 21 bp, Homo sapiens
ccaatcaagartcaagcactg

SEQ ID NO: 17985 - DNA, 21 bp, Homo sapiens
ataatgaaacracctctatgc

SEQ ID NO: 17986 - DNA, 21 bp, Homo sapiens
aagatacttgmaagtatggaa

SEQ ID NO: 17987 - DNA, 21 bp, Homo sapiens
gccaagttgtygggttggtca

SEQ ID NO: 17988 - DNA, 21 bp, Homo sapiens
ggggtgagggragaccctgtg

SEQ ID NO: 17989 - DNA, 21 bp, Homo sapiens
ctcattcaccrtcaaagaatt

SEQ ID NO: 17990 - DNA, 21 bp, Homo sapiens
agacagcagamctttatgcct

SEQ ID NO: 17991 - DNA, 21 bp, Homo sapiens
ctttactttckcagggctctg

SEQ ID NO: 17992 - DNA, 21 bp, Homo sapiens
tgcatcttttygcaaatttat

SEQ ID NO: 17993 - DNA, 21 bp, Homo sapiens
aacatctaggyctttccaaag

SEQ ID NO: 17994 - DNA, 21 bp, Homo sapiens
accaggagttraacagcgggt

SEQ ID NO: 17995 - DNA, 21 bp, Homo sapiens
acattagatcrttgaaagtca

SEQ ID NO: 17996 - DNA, 21 bp, Homo sapiens
gagtttggggrtttggtgacc

SEQ ID NO: 17997 - DNA, 21 bp, Homo sapiens
gaagcagtcamatacgcaatt

SEQ ID NO: 17998 - DNA, 21 bp, Homo sapiens
actgaagtctkcagggtcatt

SEQ ID NO: 17999 - DNA, 21 bp, Homo sapiens
tatgcttttayaaattacctg

SEQ ID NO: 18000 - DNA, 21 bp, Homo sapiens
catgcctttgkctggctcggt

SEQ ID NO: 18001 - DNA, 21 bp, Homo sapiens
gctttaagaayaaagggcctc

SEQ ID NO: 18002 - DNA, 21 bp, Homo sapiens
cgtgaaagtgkccatttccag

SEQ ID NO: 18003 - DNA, 21 bp, Homo sapiens
ttcccatttcrcagatggaga

SEQ ID NO: 18004 - DNA, 21 bp, Homo sapiens
gagcggtcatyacatcaatac

SEQ ID NO: 18005 - DNA, 21 bp, Homo sapiens
ctaatggcctytgatgtcttc

SEQ ID NO: 18006 - DNA, 21 bp, Homo sapiens
atagtctgackgcactattga

SEQ ID NO: 18007 - DNA, 21 bp, Homo sapiens
tattgtattcygccttaaccc

SEQ ID NO: 18008 - DNA, 21 bp, Homo sapiens
ctgatttatayggctgggtga

SEQ ID NO: 18009 - DNA, 21 bp, Homo sapiens
tgtaaattctrtctggaaaaa

SEQ ID NO: 18010 - DNA, 21 bp, Homo sapiens
cagccatgatrataaaaagaa

SEQ ID NO: 18011 - DNA, 21 bp, Homo sapiens
ggggaaaccarggtagagtca

SEQ ID NO: 18012 - DNA, 21 bp, Homo sapiens
tcaaggctgartgagagaact

SEQ ID NO: 18013 - DNA, 21 bp, Homo sapiens
cgggcacttcytacatgccag

SEQ ID NO: 18014 - DNA, 21 bp, Homo sapiens
acagcggcctytgggggcctt

SEQ ID NO: 18015 - DNA, 21 bp, Homo sapiens
catcctcccakggacaggaac

SEQ ID NO: 18016 - DNA, 21 bp, Homo sapiens
caggtgaggaragcatggtcc

SEQ ID NO: 18017 - DNA, 21 bp, Homo sapiens
ctggtggcccrgggttccctg

SEQ ID NO: 18018 - DNA, 21 bp, Homo sapiens
taaaatcctayctcctccagg

SEQ ID NO: 18019 - DNA, 21 bp, Homo sapiens
gaagcaaattrtaagggaaca

SEQ ID NO: 18020 - DNA, 21 bp, Homo sapiens
tgcttagaccyagaacagggg

SEQ ID NO: 18021 - DNA, 21 bp, Homo sapiens
tcttccacagrgcatgagtgc

SEQ ID NO: 18022 - DNA, 21 bp, Homo sapiens
atggacattcrtttaacaggg

SEQ ID NO: 18023 - DNA, 21 bp, Homo sapiens
ctgatgaaaayctagctcctt

SEQ ID NO: 18024 - DNA, 21 bp, Homo sapiens
acaatggctgrgcaccagtca

SEQ ID NO: 18025 - DNA, 21 bp, Homo sapiens
cccagtcaagygctaggaaac

SEQ ID NO: 18026 - DNA, 21 bp, Homo sapiens
agtttttggtkcttcccattt

SEQ ID NO: 18027 - DNA, 21 bp, Homo sapiens
gtgatttgtayttctgggtaa

SEQ ID NO: 18028 - DNA, 21 bp, Homo sapiens
attgaaatacrgagtgcgctc

SEQ ID NO: 18029 - DNA, 21 bp, Homo sapiens
ccatccccggygtttcttagg

SEQ ID NO: 18030 - DNA, 21 bp, Homo sapiens
gactccatccygcagttgttc

SEQ ID NO: 18031 - DNA, 21 bp, Homo sapiens
gggaagaaccyggacctcaac

SEQ ID NO: 18032 - DNA, 21 bp, Homo sapiens
ttgttaccacmtggcagggat

SEQ ID NO: 18033 - DNA, 21 bp, Homo sapiens
ccgaggcatcyctgtacctgt

SEQ ID NO: 18034 - DNA, 21 bp, Homo sapiens
gtcctattccrctgttctgag

SEQ ID NO: 18035 - DNA, 21 bp, Homo sapiens
tgggaagcttraaggaaagat

SEQ ID NO: 18036 - DNA, 21 bp, Homo sapiens
tggtagcactrcaaaggtaat

SEQ ID NO: 18037 - DNA, 21 bp, Homo sapiens
cggccctccamgtctggaggg

SEQ ID NO: 18038 - DNA, 21 bp, Homo sapiens
actttttttgktgttgttgaa

SEQ ID NO: 18039 - DNA, 21 bp, Homo sapiens
agcagctaacyccagggaatg

SEQ ID NO: 18040 - DNA, 21 bp, Homo sapiens
ttcactgatcrtggtgtgggg

SEQ ID NO: 18041 - DNA, 21 bp, Homo sapiens
agcaagcgccytgagcgccat

SEQ ID NO: 18042 - DNA, 21 bp, Homo sapiens
agcagcctccycctgctgtca

SEQ ID NO: 18043 - DNA, 21 bp, Homo sapiens
aaggaaagttkaaaaagtgcc

SEQ ID NO: 18044 - DNA, 21 bp, Homo sapiens
cagggatgcartggtgagtgg

SEQ ID NO: 18045 - DNA, 21 bp, Homo sapiens
agattctagargaaaagactt

SEQ ID NO: 18046 - DNA, 21 bp, Homo sapiens
aactttataayttaccctgca

SEQ ID NO: 18047 - DNA, 21 bp, Homo sapiens
agccagcaccygggatagggt

SEQ ID NO: 18048 - DNA, 21 bp, Homo sapiens
cagccccaagrtcacaaagat

SEQ ID NO: 18049 - DNA, 21 bp, Homo sapiens
agtgccttggkgtacagagcg

SEQ ID NO: 18050 - DNA, 21 bp, Homo sapiens
gttaggacaayatcccttcta

SEQ ID NO: 18051 - DNA, 21 bp, Homo sapiens
gagcaggtggrggggcctgac

SEQ ID NO: 18052 - DNA, 21 bp, Homo sapiens
aacctaattcmtgtacctaat

SEQ ID NO: 18053 - DNA, 21 bp, Homo sapiens
acgatgatggrggtgaagaga

SEQ ID NO: 18054 - DNA, 21 bp, Homo sapiens
taggtggcttytcagctttta

SEQ ID NO: 18055 - DNA, 21 bp, Homo sapiens
tgctgttaccrttgccatcat

SEQ ID NO: 18056 - DNA, 21 bp, Homo sapiens
ttatttggaarcggggttttt

SEQ ID NO: 18057 - DNA, 21 bp, Homo sapiens
agtcggaatcktaccatatgt

SEQ ID NO: 18058 - DNA, 21 bp, Homo sapiens
ggaagcgtatkgtccacactt

SEQ ID NO: 18059 - DNA, 21 bp, Homo sapiens
tcttgggtttycacttagagc

SEQ ID NO: 18060 - DNA, 21 bp, Homo sapiens
agggcacaccrcagccaccgc

SEQ ID NO: 18061 - DNA, 21 bp, Homo sapiens
tgcccacgacmtgcagggtag

SEQ ID NO: 18062 - DNA, 21 bp, Homo sapiens
tgggactggtkcccttatagc

SEQ ID NO: 18063 - DNA, 21 bp, Homo sapiens
ctcctctggakcaggcattgc

SEQ ID NO: 18064 - DNA, 21 bp, Homo sapiens
gcccctgccaygtaggaattc

SEQ ID NO: 18065 - DNA, 21 bp, Homo sapiens
ggggacagacrcaactggcat

SEQ ID NO: 18066 - DNA, 21 bp, Homo sapiens
agcacttaccrtgcaagtctg

SEQ ID NO: 18067 - DNA, 21 bp, Homo sapiens
ggataataacygtctccacat

SEQ ID NO: 18068 - DNA, 21 bp, Homo sapiens
gcactttctcktctttggggg

SEQ ID NO: 18069 - DNA, 21 bp, Homo sapiens
aagaagacccmaaaccaaact

SEQ ID NO: 18070 - DNA, 21 bp, Homo sapiens
ggcttcagcamataaatgtta

SEQ ID NO: 18071 - DNA, 21 bp, Homo sapiens
ctgtggcttgmcatgtagatg

SEQ ID NO: 18072 - DNA, 21 bp, Homo sapiens
attcaccaggyggccctgtgg

SEQ ID NO: 18073 - DNA, 21 bp, Homo sapiens
aatttcatagytgtgcttctg

SEQ ID NO: 18074 - DNA, 21 bp, Homo sapiens
gacaggtcccyccagcttgcc

SEQ ID NO: 18075 - DNA, 21 bp, Homo sapiens
atgtctgttgyttttatctta

SEQ ID NO: 18076 - DNA, 21 bp, Homo sapiens
aatctcactcycaagaaaggg

SEQ ID NO: 18077 - DNA, 21 bp, Homo sapiens
ggaccagcttytccctcagtc

SEQ ID NO: 18078 - DNA, 21 bp, Homo sapiens
tgcccagttgygggctgggcc

SEQ ID NO: 18079 - DNA, 21 bp, Homo sapiens
agagggtgacygtgtgaggac

SEQ ID NO: 18080 - DNA, 21 bp, Homo sapiens
tgggtgcaggygcccagccag

SEQ ID NO: 18081 - DNA, 21 bp, Homo sapiens
gttccctttgmagtcactcag

SEQ ID NO: 18082 - DNA, 21 bp, Homo sapiens
aacgcccctcycaaggcaatc

SEQ ID NO: 18083 - DNA, 21 bp, Homo sapiens
acgcatgtacrtgtacaaaac

SEQ ID NO: 18084 - DNA, 21 bp, Homo sapiens
gtcttagtgcygcattaatgt

SEQ ID NO: 18085 - DNA, 21 bp, Homo sapiens
taaaagagacrgaaaatgtga

SEQ ID NO: 18086 - DNA, 21 bp, Homo sapiens
tcctgtgcagrtcaaggcctg

SEQ ID NO: 18087 - DNA, 21 bp, Homo sapiens
ggagctgggaragttcctaag

SEQ ID NO: 18088 - DNA, 21 bp, Homo sapiens
cttttgtaccrtctttggttt

SEQ ID NO: 18089 - DNA, 21 bp, Homo sapiens
gataactcacrcactcctgag

SEQ ID NO: 18090 - DNA, 21 bp, Homo sapiens
gcctgagagtrtggagggtgg

SEQ ID NO: 18091 - DNA, 21 bp, Homo sapiens
gaggccctctkggatcctctg

SEQ ID NO: 18092 - DNA, 21 bp, Homo sapiens
tggaagtgagmctgagctgca

SEQ ID NO: 18093 - DNA, 21 bp, Homo sapiens
gtactaagcaytcataggaga

SEQ ID NO: 18094 - DNA, 21 bp, Homo sapiens
tcaccccagargacaggcctt

SEQ ID NO: 18095 - DNA, 21 bp, Homo sapiens
ccacccaggcrttcccctggg

SEQ ID NO: 18096 - DNA, 21 bp, Homo sapiens
gctgccttccrgtcaccagga

SEQ ID NO: 18097 - DNA, 21 bp, Homo sapiens
atgccacacayttgcacattt

SEQ ID NO: 18098 - DNA, 21 bp, Homo sapiens
ccagtgaccaygaaggctgtg

SEQ ID NO: 18099 - DNA, 21 bp, Homo sapiens
tcctccacccrtctgtccctc

SEQ ID NO: 18100 - DNA, 21 bp, Homo sapiens
aggagggcccrgtaaaggctg

SEQ ID NO: 18101 - DNA, 21 bp, Homo sapiens
ggtctttattkcctattagaa

SEQ ID NO: 18102 - DNA, 21 bp, Homo sapiens
gtttccttctrtccatactaa

SEQ ID NO: 18103 - DNA, 21 bp, Homo sapiens
gctttggggcrgctaattatg

SEQ ID NO: 18104 - DNA, 21 bp, Homo sapiens
caaggtgggtrtgcaggggta

SEQ ID NO: 18105 - DNA, 21 bp, Homo sapiens
ctggactaggratgagtgtat

SEQ ID NO: 18106 - DNA, 21 bp, Homo sapiens
tgagggtagcrtgggccagct

SEQ ID NO: 18107 - DNA, 21 bp, Homo sapiens
gagtttcttgrttttaggcgc

SEQ ID NO: 18108 - DNA, 21 bp, Homo sapiens
agagctgtgaygtttgatggc

SEQ ID NO: 18109 - DNA, 21 bp, Homo sapiens
attttggtttyctgacattgc

SEQ ID NO: 18110 - DNA, 21 bp, Homo sapiens
acagccagggytgcaaggagc

SEQ ID NO: 18111 - DNA, 21 bp, Homo sapiens
atggaaaccargagagaagag

SEQ ID NO: 18112 - DNA, 21 bp, Homo sapiens
gggggcttctrtctcaagatg

SEQ ID NO: 18113 - DNA, 21 bp, Homo sapiens
aactgccactkggtagaggac

SEQ ID NO: 18114 - DNA, 21 bp, Homo sapiens
ccctccccgcygcttctgagt

SEQ ID NO: 18115 - DNA, 21 bp, Homo sapiens
tgggcctagaygttgagttca

SEQ ID NO: 18116 - DNA, 21 bp, Homo sapiens
ggttttcagaytcacagatga

SEQ ID NO: 18117 - DNA, 21 bp, Homo sapiens
ctatttaattyggcatctctc

SEQ ID NO: 18118 - DNA, 21 bp, Homo sapiens
ccagtttgctktcttctagta

SEQ ID NO: 18119 - DNA, 21 bp, Homo sapiens
tttcccatccrccccaagatc

SEQ ID NO: 18120 - DNA, 21 bp, Homo sapiens
ggctcactaaygtgttgtatg

SEQ ID NO: 18121 - DNA, 21 bp, Homo sapiens
tcatattaggygctgtatgac

SEQ ID NO: 18122 - DNA, 21 bp, Homo sapiens
ccagtgtatgycctggcgcac

SEQ ID NO: 18123 - DNA, 21 bp, Homo sapiens
atggtttgttktaagagaaaa

SEQ ID NO: 18124 - DNA, 21 bp, Homo sapiens
cgggagttccrtttgtgctgg

SEQ ID NO: 18125 - DNA, 21 bp, Homo sapiens
aaatgggcccyagttcctgga

SEQ ID NO: 18126 - DNA, 21 bp, Homo sapiens
acagcacaaayccctggaatt

SEQ ID NO: 18127 - DNA, 21 bp, Homo sapiens
tccaccacagragcgcactgg

SEQ ID NO: 18128 - DNA, 21 bp, Homo sapiens
gtccccaaccygtgaacatta

SEQ ID NO: 18129 - DNA, 21 bp, Homo sapiens
cagtgtccaartctgcacccc

SEQ ID NO: 18130 - DNA, 21 bp, Homo sapiens
actctacggtytgtagggcac

SEQ ID NO: 18131 - DNA, 21 bp, Homo sapiens
agagtgctgcyaatgccccag

SEQ ID NO: 18132 - DNA, 21 bp, Homo sapiens
aacacacacaygacaccacca

SEQ ID NO: 18133 - DNA, 21 bp, Homo sapiens
ccagctgtcayggaatccaaa

SEQ ID NO: 18134 - DNA, 21 bp, Homo sapiens
gagcagacgcyccaggggtcc

SEQ ID NO: 18135 - DNA, 21 bp, Homo sapiens
ttgagggcacrtgtggcacag

SEQ ID NO: 18136 - DNA, 21 bp, Homo sapiens
agtcagagcaygagcatcccc

SEQ ID NO: 18137 - DNA, 21 bp, Homo sapiens
cccctggggarcaggacagac

SEQ ID NO: 18138 - DNA, 21 bp, Homo sapiens
ccgtgcctacrccggggttgg

SEQ ID NO: 18139 - DNA, 21 bp, Homo sapiens
tgacagacacrtccgtcagaa

SEQ ID NO: 18140 - DNA, 21 bp, Homo sapiens
cggagctgccragaagcctct

SEQ ID NO: 18141 - DNA, 21 bp, Homo sapiens
actctgatatrtgtttaacaa

SEQ ID NO: 18142 - DNA, 21 bp, Homo sapiens
gaggcagggtktattttcatc

SEQ ID NO: 18143 - DNA, 21 bp, Homo sapiens
tcatagggcaragtcaaggaa

SEQ ID NO: 18144 - DNA, 21 bp, Homo sapiens
aaacgactcckcggcctgtcc

SEQ ID NO: 18145 - DNA, 21 bp, Homo sapiens
tcccatagtcyttctcacccc

SEQ ID NO: 18146 - DNA, 21 bp, Homo sapiens
aaaaaaaaaamcaaaatgaaa

SEQ ID NO: 18147 - DNA, 21 bp, Homo sapiens
aaataactttyttgagttcag

SEQ ID NO: 18148 - DNA, 21 bp, Homo sapiens
ctattaacatycctctttgat

SEQ ID NO: 18149 - DNA, 21 bp, Homo sapiens
tttgctcctayggtgtaatgg

SEQ ID NO: 18150 - DNA, 21 bp, Homo sapiens
caaatgaatartaatgcaaaa

SEQ ID NO: 18151 - DNA, 21 bp, Homo sapiens
aaaggaagtgygcattgtggg

SEQ ID NO: 18152 - DNA, 21 bp, Homo sapiens
ggaaagccagkttaaaaattc

SEQ ID NO: 18153 - DNA, 21 bp, Homo sapiens
tagcaataaartgcagggcta

SEQ ID NO: 18154 - DNA, 21 bp, Homo sapiens
ccatttgggayagtttcatgt

SEQ ID NO: 18155 - DNA, 21 bp, Homo sapiens
aacttacttcytcatcactaa

SEQ ID NO: 18156 - DNA, 21 bp, Homo sapiens
tttttcttctrtgggtatagg

SEQ ID NO: 18157 - DNA, 21 bp, Homo sapiens
tctggtctcaytagatgaagc

SEQ ID NO: 18158 - DNA, 21 bp, Homo sapiens
cagggaaatakaagcaccatt

SEQ ID NO: 18159 - DNA, 21 bp, Homo sapiens
atatttaaatmattggcacca

SEQ ID NO: 18160 - DNA, 21 bp, Homo sapiens
tacccagggarctttgaccat

SEQ ID NO: 18161 - DNA, 21 bp, Homo sapiens
catcattatcrttcaaaatga

SEQ ID NO: 18162 - DNA, 21 bp, Homo sapiens
cacatcagtcrttgagatctt

SEQ ID NO: 18163 - DNA, 21 bp, Homo sapiens
cccttgccgcygtcttaatga

SEQ ID NO: 18164 - DNA, 21 bp, Homo sapiens
acacaccacaragggagagaa

SEQ ID NO: 18165 - DNA, 21 bp, Homo sapiens
taagctctgamagtagggtct

SEQ ID NO: 18166 - DNA, 21 bp, Homo sapiens
tgattttgggraaccccaaat

SEQ ID NO: 18167 - DNA, 21 bp, Homo sapiens
gggcatcaggratgttataaa

SEQ ID NO: 18168 - DNA, 21 bp, Homo sapiens
agagcactgtrtcctttcatt

SEQ ID NO: 18169 - DNA, 21 bp, Homo sapiens
atcaattttaytatgcccaaa

SEQ ID NO: 18170 - DNA, 21 bp, Homo sapiens
agtggaaatayacgacaaaat

SEQ ID NO: 18171 - DNA, 21 bp, Homo sapiens
cagcaaatatkttttacagca

SEQ ID NO: 18172 - DNA, 21 bp, Homo sapiens
gttcccggacrttggagacag

SEQ ID NO: 18173 - DNA, 21 bp, Homo sapiens
ggggagacccyggcccaggga

SEQ ID NO: 18174 - DNA, 21 bp, Homo sapiens
ctgcttctgaycttgtttatt

SEQ ID NO: 18175 - DNA, 21 bp, Homo sapiens
gtgagaccctrcctcaaaaaa

SEQ ID NO: 18176 - DNA, 21 bp, Homo sapiens
tctattcaccrtccctcaaat

SEQ ID NO: 18177 - DNA, 21 bp, Homo sapiens
tgactacactrgaacacaggc

SEQ ID NO: 18178 - DNA, 21 bp, Homo sapiens
aaagtggacartaatgtaaca

SEQ ID NO: 18179 - DNA, 21 bp, Homo sapiens
aaaccctacayatctaaaacc

SEQ ID NO: 18180 - DNA, 21 bp, Homo sapiens
agtatttaatyggaacattat

SEQ ID NO: 18181 - DNA, 21 bp, Homo sapiens
ttttggtgtgytttacctcga

SEQ ID NO: 18182 - DNA, 21 bp, Homo sapiens
aatgcaagtamccccaactca

SEQ ID NO: 18183 - DNA, 21 bp, Homo sapiens
aagaggaaccrttgaacttca

SEQ ID NO: 18184 - DNA, 21 bp, Homo sapiens
aacttacacayataaaacaca

SEQ ID NO: 18185 - DNA, 21 bp, Homo sapiens
attacattctktgtcttggga

SEQ ID NO: 18186 - DNA, 21 bp, Homo sapiens
tatcagttttygatcaataaa

SEQ ID NO: 18187 - DNA, 21 bp, Homo sapiens
aggaagttcaygaggagttgg

SEQ ID NO: 18188 - DNA, 21 bp, Homo sapiens
acttgggaccycagctacagg

SEQ ID NO: 18189 - DNA, 21 bp, Homo sapiens
ataggactgtmttaattatct

SEQ ID NO: 18190 - DNA, 21 bp, Homo sapiens
tgttacactgyatgaacatga

SEQ ID NO: 18191 - DNA, 21 bp, Homo sapiens
aatcagtatcmttacatttta

SEQ ID NO: 18192 - DNA, 21 bp, Homo sapiens
tgtagaggttrgagtggtagg

SEQ ID NO: 18193 - DNA, 21 bp, Homo sapiens
gtcctcctgcrttcacatttg

SEQ ID NO: 18194 - DNA, 21 bp, Homo sapiens
attggaggtcmtggaacggtt

SEQ ID NO: 18195 - DNA, 21 bp, Homo sapiens
ttttctgcatkgaattgtaag

SEQ ID NO: 18196 - DNA, 21 bp, Homo sapiens
tatttacttgrgagtattaga

SEQ ID NO: 18197 - DNA, 21 bp, Homo sapiens
cacttatttcytccctgtgat

SEQ ID NO: 18198 - DNA, 21 bp, Homo sapiens
aagaaaggagrgattagaatg

SEQ ID NO: 18199 - DNA, 21 bp, Homo sapiens
gtagtgaataraatatatact

SEQ ID NO: 18200 - DNA, 21 bp, Homo sapiens
tttgcaactayatgcatggaa

SEQ ID NO: 18201 - DNA, 21 bp, Homo sapiens
acacaaaattraattccactt

SEQ ID NO: 18202 - DNA, 21 bp, Homo sapiens
aaacaatgaaratctgacaaa

SEQ ID NO: 18203 - DNA, 21 bp, Homo sapiens
cgaatagttayctctcattta

SEQ ID NO: 18204 - DNA, 21 bp, Homo sapiens
gaagcttagtytggaaaaaaa

SEQ ID NO: 18205 - DNA, 21 bp, Homo sapiens
atcaagaagartgtattcgcc

SEQ ID NO: 18206 - DNA, 21 bp, Homo sapiens
ccacagtctcyataattatca

SEQ ID NO: 18207 - DNA, 21 bp, Homo sapiens
tggcaattgaytcaggatggg

SEQ ID NO: 18208 - DNA, 21 bp, Homo sapiens
tcatagctccmagggcaagtc

SEQ ID NO: 18209 - DNA, 21 bp, Homo sapiens
tcattgtcctrgatcctgtca

SEQ ID NO: 18210 - DNA, 21 bp, Homo sapiens
aatccattaargtaattttag

SEQ ID NO: 18211 - DNA, 21 bp, Homo sapiens
tcttgggaatrtcacacagtt

SEQ ID NO: 18212 - DNA, 21 bp, Homo sapiens
ttattgttatyataaaaatca

SEQ ID NO: 18213 - DNA, 21 bp, Homo sapiens
cagttttagcractttagact

SEQ ID NO: 18214 - DNA, 21 bp, Homo sapiens
tttgtcatctrcaaacttgga

SEQ ID NO: 18215 - DNA, 21 bp, Homo sapiens
ttgaacaattrtgcagcatac

SEQ ID NO: 18216 - DNA, 21 bp, Homo sapiens
acatttcttargggagaggag

SEQ ID NO: 18217 - DNA, 21 bp, Homo sapiens
gctaaaatcckttttttagaa

SEQ ID NO: 18218 - DNA, 21 bp, Homo sapiens
tgagtaccccrggaaccaaac

SEQ ID NO: 18219 - DNA, 21 bp, Homo sapiens
agattagctgraaattcataa

SEQ ID NO: 18220 - DNA, 21 bp, Homo sapiens
tagtaattcarttgtctctgg

SEQ ID NO: 18221 - DNA, 21 bp, Homo sapiens
agacggggagmggcacatctg

SEQ ID NO: 18222 - DNA, 21 bp, Homo sapiens
atgttgatggrtgataatatt

SEQ ID NO: 18223 - DNA, 21 bp, Homo sapiens
ccctgtatctytgtgtcttag

SEQ ID NO: 18224 - DNA, 21 bp, Homo sapiens
atatatatggrcttttaaaaa

SEQ ID NO: 18225 - DNA, 21 bp, Homo sapiens
tggctctttcytctgcttaaa

SEQ ID NO: 18226 - DNA, 21 bp, Homo sapiens
ttgatgcatcrttttacttct

SEQ ID NO: 18227 - DNA, 21 bp, Homo sapiens
ttgtggcttgyctattcatac

SEQ ID NO: 18228 - DNA, 21 bp, Homo sapiens
aacttgggcargttctcatgg

SEQ ID NO: 18229 - DNA, 21 bp, Homo sapiens
ttgcagatttycttactgtaa

SEQ ID NO: 18230 - DNA, 21 bp, Homo sapiens
tatccactgckctctatttgt

SEQ ID NO: 18231 - DNA, 21 bp, Homo sapiens
cttaagttcaygtagagcaac

SEQ ID NO: 18232 - DNA, 21 bp, Homo sapiens
tgtggtgtttrtatgtttctc

SEQ ID NO: 18233 - DNA, 21 bp, Homo sapiens
gccagactatyttatcccatt

SEQ ID NO: 18234 - DNA, 21 bp, Homo sapiens
caggctagacrctttagattt

SEQ ID NO: 18235 - DNA, 21 bp, Homo sapiens
gtctttcccayctgtttgtgg

SEQ ID NO: 18236 - DNA, 21 bp, Homo sapiens
aaatctcttakgtctgtgaat

SEQ ID NO: 18237 - DNA, 21 bp, Homo sapiens
atgtacaacayaaatatatac

SEQ ID NO: 18238 - DNA, 21 bp, Homo sapiens
tcttagcagtrtattgcacag

SEQ ID NO: 18239 - DNA, 21 bp, Homo sapiens
aagatggaagkgaggcctttt

SEQ ID NO: 18240 - DNA, 21 bp, Homo sapiens
agagtaactcyagtctagtat

SEQ ID NO: 18241 - DNA, 21 bp, Homo sapiens
ataattaccaygaatttgatc

SEQ ID NO: 18242 - DNA, 21 bp, Homo sapiens
aacagtgagayccttactcca

SEQ ID NO: 18243 - DNA, 21 bp, Homo sapiens
ataggtaaacyacaatgagac

SEQ ID NO: 18244 - DNA, 21 bp, Homo sapiens
atttctaggayacagaaaaga

SEQ ID NO: 18245 - DNA, 21 bp, Homo sapiens
aaatcctgccrtgaattctta

SEQ ID NO: 18246 - DNA, 21 bp, Homo sapiens
aattcctcatraaaaaagaat

SEQ ID NO: 18247 - DNA, 21 bp, Homo sapiens
aacggatgtaytttagcaaga

SEQ ID NO: 18248 - DNA, 21 bp, Homo sapiens
tcatccaaagrgaatacacat

SEQ ID NO: 18249 - DNA, 21 bp, Homo sapiens
aaataaaaatrctttttgcaa

SEQ ID NO: 18250 - DNA, 21 bp, Homo sapiens
tacatattttraaagttcaat

SEQ ID NO: 18251 - DNA, 21 bp, Homo sapiens
agtgtgacgamtgtcaaaaaa

SEQ ID NO: 18252 - DNA, 21 bp, Homo sapiens
gacattttcaraaacatggat

SEQ ID NO: 18253 - DNA, 21 bp, Homo sapiens
aaactactgtrctctatttca

SEQ ID NO: 18254 - DNA, 21 bp, Homo sapiens
agagattaatyagaaatgtgc

SEQ ID NO: 18255 - DNA, 21 bp, Homo sapiens
ttcaccattcrcctgagttct

SEQ ID NO: 18256 - DNA, 21 bp, Homo sapiens
taacagtacaytaaaatatag

SEQ ID NO: 18257 - DNA, 21 bp, Homo sapiens
caaagcccacrtctatcattc

SEQ ID NO: 18258 - DNA, 21 bp, Homo sapiens
atgactctctrtagttcttag

SEQ ID NO: 18259 - DNA, 21 bp, Homo sapiens
tcatgatataktatatgatcc

SEQ ID NO: 18260 - DNA, 21 bp, Homo sapiens
ttgttgaataygtaactatag

SEQ ID NO: 18261 - DNA, 21 bp, Homo sapiens
gaacaactaaracttttattc

SEQ ID NO: 18262 - DNA, 21 bp, Homo sapiens
cttaatgccayaagatgatct

SEQ ID NO: 18263 - DNA, 21 bp, Homo sapiens
ctaaggcttcyaaacattccc

SEQ ID NO: 18264 - DNA, 21 bp, Homo sapiens
aaaatgatgayatgggaggtt

SEQ ID NO: 18265 - DNA, 21 bp, Homo sapiens
tgtaaattagraagaaagggg

SEQ ID NO: 18266 - DNA, 21 bp, Homo sapiens
aggatgtgtgyacttacacgg

SEQ ID NO: 18267 - DNA, 21 bp, Homo sapiens
tttgcaaaggrgattaaaaag

SEQ ID NO: 18268 - DNA, 21 bp, Homo sapiens
cttggagcaargagaaactaa

SEQ ID NO: 18269 - DNA, 21 bp, Homo sapiens
atttatggaakcatctgaaaa

SEQ ID NO: 18270 - DNA, 21 bp, Homo sapiens
ctgcaagtggygctggatacc

SEQ ID NO: 18271 - DNA, 21 bp, Homo sapiens
cactcatgatrgagacgaagg

SEQ ID NO: 18272 - DNA, 21 bp, Homo sapiens
acatatgaacmtgaacctccg

SEQ ID NO: 18273 - DNA, 21 bp, Homo sapiens
gttatggaagytgtgagttgt

SEQ ID NO: 18274 - DNA, 21 bp, Homo sapiens
atgggaggaayggaagaatgg

SEQ ID NO: 18275 - DNA, 21 bp, Homo sapiens
gttctacaacraaagattgat

SEQ ID NO: 18276 - DNA, 21 bp, Homo sapiens
ccaggtaattytgcaactggg

SEQ ID NO: 18277 - DNA, 21 bp, Homo sapiens
aaatcaaacakgtacagaata

SEQ ID NO: 18278 - DNA, 21 bp, Homo sapiens
ctgggtacaayaaagtgggtc

SEQ ID NO: 18279 - DNA, 21 bp, Homo sapiens
aatcttcataygagtggaccc

SEQ ID NO: 18280 - DNA, 21 bp, Homo sapiens
aaacctgcacrcataaaatga

SEQ ID NO: 18281 - DNA, 21 bp, Homo sapiens
gaagaaactckgggcagccag

SEQ ID NO: 18282 - DNA, 21 bp, Homo sapiens
aagacagaackctggaaatac

SEQ ID NO: 18283 - DNA, 21 bp, Homo sapiens
caatgtgtgtyagggacagca

SEQ ID NO: 18284 - DNA, 21 bp, Homo sapiens
agtcctgtgcrtaaactttgg

SEQ ID NO: 18285 - DNA, 21 bp, Homo sapiens
ctatcaggaamgcaaggccaa

SEQ ID NO: 18286 - DNA, 21 bp, Homo sapiens
aagtcaaatcygctgattact

SEQ ID NO: 18287 - DNA, 21 bp, Homo sapiens
agctttgctayttaaaagagc

SEQ ID NO: 18288 - DNA, 21 bp, Homo sapiens
tgagattcacygtagaaggaa

SEQ ID NO: 18289 - DNA, 21 bp, Homo sapiens
tactcttatcrttggtgtcaa

SEQ ID NO: 18290 - DNA, 21 bp, Homo sapiens
gtttagtgttkttgttgttgt

SEQ ID NO: 18291 - DNA, 21 bp, Homo sapiens
tggtcacttcrgagcatttta

SEQ ID NO: 18292 - DNA, 21 bp, Homo sapiens
aaccaaagctrttaagtttaa

SEQ ID NO: 18293 - DNA, 21 bp, Homo sapiens
tatggatgcayagctattagg

SEQ ID NO: 18294 - DNA, 21 bp, Homo sapiens
tttacaatttktgttccctct

SEQ ID NO: 18295 - DNA, 21 bp, Homo sapiens
aattcatgagraagagttcca

SEQ ID NO: 18296 - DNA, 21 bp, Homo sapiens
gttgtagcccytccctcaccg

SEQ ID NO: 18297 - DNA, 21 bp, Homo sapiens
gttcatttttratttcttcag

SEQ ID NO: 18298 - DNA, 21 bp, Homo sapiens
aatatatatayagttttccaa

SEQ ID NO: 18299 - DNA, 21 bp, Homo sapiens
ttaaagagaaraagaagaaat

SEQ ID NO: 18300 - DNA, 21 bp, Homo sapiens
gccaacagaayagtaaatagg

SEQ ID NO: 18301 - DNA, 21 bp, Homo sapiens
gctacataggyaggcagctct

SEQ ID NO: 18302 - DNA, 21 bp, Homo sapiens
atttacctggygtttcttgtg

SEQ ID NO: 18303 - DNA, 21 bp, Homo sapiens
ttgaaatatgmgtactgctca

SEQ ID NO: 18304 - DNA, 21 bp, Homo sapiens
tatggagccarttttagtttt

SEQ ID NO: 18305 - DNA, 21 bp, Homo sapiens
aatatccctcrcaactcaagt

SEQ ID NO: 18306 - DNA, 21 bp, Homo sapiens
aagaacttcaytaatgaaact

SEQ ID NO: 18307 - DNA, 21 bp, Homo sapiens
aaaattttcartatggaagga

SEQ ID NO: 18308 - DNA, 21 bp, Homo sapiens
ctagaatctcmaataaggcag

SEQ ID NO: 18309 - DNA, 21 bp, Homo sapiens
atattatgtarctggaatcaa

SEQ ID NO: 18310 - DNA, 21 bp, Homo sapiens
tgacttcagaraagtcttttc

SEQ ID NO: 18311 - DNA, 21 bp, Homo sapiens
catctattttycccagcagaa

SEQ ID NO: 18312 - DNA, 21 bp, Homo sapiens
tatgtcaagaragtcagtagg

SEQ ID NO: 18313 - DNA, 21 bp, Homo sapiens
attaatgggcmtctaaaccaa

SEQ ID NO: 18314 - DNA, 21 bp, Homo sapiens
actacattcayctaaagcacc

SEQ ID NO: 18315 - DNA, 21 bp, Homo sapiens
gaaactacccktgcaatccgt

SEQ ID NO: 18316 - DNA, 21 bp, Homo sapiens
acattctggtrccagctctgt

SEQ ID NO: 18317 - DNA, 21 bp, Homo sapiens
gcttgcttggraggattgtcc

SEQ ID NO: 18318 - DNA, 21 bp, Homo sapiens
gcaaagcccgkgttcagaggt

SEQ ID NO: 18319 - DNA, 21 bp, Homo sapiens
ttatttcaaakagttaggatt

SEQ ID NO: 18320 - DNA, 21 bp, Homo sapiens
taatctggccrtgcacacctc

SEQ ID NO: 18321 - DNA, 21 bp, Homo sapiens
gagcttgatarccaagcagtc

SEQ ID NO: 18322 - DNA, 21 bp, Homo sapiens
cccatagatcrtcagcttgca

SEQ ID NO: 18323 - DNA, 21 bp, Homo sapiens
aatagcaaacmgtctaaaaat

SEQ ID NO: 18324 - DNA, 21 bp, Homo sapiens
atttattctayagtcgtgatc

SEQ ID NO: 18325 - DNA, 21 bp, Homo sapiens
aacaaacaaayaaacacccac

SEQ ID NO: 18326 - DNA, 21 bp, Homo sapiens
tcagtctgatrtagtatgaaa

SEQ ID NO: 18327 - DNA, 21 bp, Homo sapiens
ccctctaaggytgagcgggtg

SEQ ID NO: 18328 - DNA, 21 bp, Homo sapiens
ctttttgggtrggatttggaa

SEQ ID NO: 18329 - DNA, 21 bp, Homo sapiens
gcctagaccakagttttggat

SEQ ID NO: 18330 - DNA, 21 bp, Homo sapiens
agaggggatamaatgatacaa

SEQ ID NO: 18331 - DNA, 21 bp, Homo sapiens
ccattggattyggttcataaa

SEQ ID NO: 18332 - DNA, 21 bp, Homo sapiens
attttgttccrtaagaaataa

SEQ ID NO: 18333 - DNA, 21 bp, Homo sapiens
actcagccgtrcttgatttat

SEQ ID NO: 18334 - DNA, 21 bp, Homo sapiens
gactgaacacyatagttgagc

SEQ ID NO: 18335 - DNA, 21 bp, Homo sapiens
agcagagcctrgaatccaggg

SEQ ID NO: 18336 - DNA, 21 bp, Homo sapiens
ctgggcttcgrtattttttta

SEQ ID NO: 18337 - DNA, 21 bp, Homo sapiens
acactcctgarcctgaagggt

SEQ ID NO: 18338 - DNA, 21 bp, Homo sapiens
cgttggtggargatcagagga

SEQ ID NO: 18339 - DNA, 21 bp, Homo sapiens
cttctcagtgmagaccacctc

SEQ ID NO: 18340 - DNA, 21 bp, Homo sapiens
caaaaatatgyattatgataa

SEQ ID NO: 18341 - DNA, 21 bp, Homo sapiens
ttttgagcacrgtgggctcag

SEQ ID NO: 18342 - DNA, 21 bp, Homo sapiens
aattcagtgaygacagcaaaa

SEQ ID NO: 18343 - DNA, 21 bp, Homo sapiens
gcaagttattyttcctaatga

SEQ ID NO: 18344 - DNA, 21 bp, Homo sapiens
aatggggtcayacgcatgagg

SEQ ID NO: 18345 - DNA, 21 bp, Homo sapiens
tccttgctgayatatctcttt

SEQ ID NO: 18346 - DNA, 21 bp, Homo sapiens
tcatggtctcycatttctctc

SEQ ID NO: 18347 - DNA, 21 bp, Homo sapiens
tcttctctctrtacttctatg

SEQ ID NO: 18348 - DNA, 21 bp, Homo sapiens
cgcccccgccrgcaggtgttt

SEQ ID NO: 18349 - DNA, 21 bp, Homo sapiens
catatgaagayataatggtgt

SEQ ID NO: 18350 - DNA, 21 bp, Homo sapiens
cctatttcccytccaattctg

SEQ ID NO: 18351 - DNA, 21 bp, Homo sapiens
aggaagtgtgrctattgctgc

SEQ ID NO: 18352 - DNA, 21 bp, Homo sapiens
tagagcccacyagtctcataa

SEQ ID NO: 18353 - DNA, 21 bp, Homo sapiens
agccagagccycagaactctc

SEQ ID NO: 18354 - DNA, 21 bp, Homo sapiens
aatagggaaayttccattcca

SEQ ID NO: 18355 - DNA, 21 bp, Homo sapiens
attgtcaaccytggctgcaca

SEQ ID NO: 18356 - DNA, 21 bp, Homo sapiens
ttcctctactytttgctttac

SEQ ID NO: 18357 - DNA, 21 bp, Homo sapiens
aactaagaccygtatgctcat

SEQ ID NO: 18358 - DNA, 21 bp, Homo sapiens
ggatatgagaycttgctgtgt

SEQ ID NO: 18359 - DNA, 21 bp, Homo sapiens
ggagatttgtrcacactttcc

SEQ ID NO: 18360 - DNA, 21 bp, Homo sapiens
aaacaggaaaygtccttaact

SEQ ID NO: 18361 - DNA, 21 bp, Homo sapiens
ttgcctgcccrggtggatccc

SEQ ID NO: 18362 - DNA, 21 bp, Homo sapiens
tagtatttaakctcctatttg

SEQ ID NO: 18363 - DNA, 21 bp, Homo sapiens
aacattctttrcagatttgga

SEQ ID NO: 18364 - DNA, 21 bp, Homo sapiens
gagaaaatggrgagatgacag

SEQ ID NO: 18365 - DNA, 21 bp, Homo sapiens
tattctaggaycctagatttt

SEQ ID NO: 18366 - DNA, 21 bp, Homo sapiens
aaattcacacmcccccgaccc

SEQ ID NO: 18367 - DNA, 21 bp, Homo sapiens
gtgtgcaagaygaagctgagt

SEQ ID NO: 18368 - DNA, 21 bp, Homo sapiens
aatacacataktattttagtc

SEQ ID NO: 18369 - DNA, 21 bp, Homo sapiens
tctttgaattygggtcatttg

SEQ ID NO: 18370 - DNA, 21 bp, Homo sapiens
agcttttcatytgaagcagaa

SEQ ID NO: 18371 - DNA, 21 bp, Homo sapiens
atttggagggkacattcaaaa

SEQ ID NO: 18372 - DNA, 21 bp, Homo sapiens
tttttgtagcrcttcccttca

SEQ ID NO: 18373 - DNA, 21 bp, Homo sapiens
attgttagagrcatctctagt

SEQ ID NO: 18374 - DNA, 21 bp, Homo sapiens
tcacatgtatmatctttttaa

SEQ ID NO: 18375 - DNA, 21 bp, Homo sapiens
tgggctgggcrttgtggttca

SEQ ID NO: 18376 - DNA, 21 bp, Homo sapiens
tctttgatcayctctcatcac

SEQ ID NO: 18377 - DNA, 21 bp, Homo sapiens
caccttgtacrtgacctgtga

SEQ ID NO: 18378 - DNA, 21 bp, Homo sapiens
caagtcaaagytgaggcacaa

SEQ ID NO: 18379 - DNA, 21 bp, Homo sapiens
gccccactttmtagacggaaa

SEQ ID NO: 18380 - DNA, 21 bp, Homo sapiens
ggcaaattcamgagctatttc

SEQ ID NO: 18381 - DNA, 21 bp, Homo sapiens
ccataattcarttgaatttct

SEQ ID NO: 18382 - DNA, 21 bp, Homo sapiens
tttctcagacygcctccactt

SEQ ID NO: 18383 - DNA, 21 bp, Homo sapiens
cagatggatgkcctgcaactt

SEQ ID NO: 18384 - DNA, 21 bp, Homo sapiens
gaagtgtctgrtgatgaacat

SEQ ID NO: 18385 - DNA, 21 bp, Homo sapiens
aatgggacacrtgactgtatt

SEQ ID NO: 18386 - DNA, 21 bp, Homo sapiens
ggtagatggcytctgcctggg

SEQ ID NO: 18387 - DNA, 21 bp, Homo sapiens
tgggccgtttyttagaaaaat

SEQ ID NO: 18388 - DNA, 21 bp, Homo sapiens
gtattttcccmgttctctttt

SEQ ID NO: 18389 - DNA, 21 bp, Homo sapiens
tgtttcactckcatccttata

SEQ ID NO: 18390 - DNA, 21 bp, Homo sapiens
ggcctatgccygaattgtctg

SEQ ID NO: 18391 - DNA, 21 bp, Homo sapiens
gtaaatgcccrgagtatttgg

SEQ ID NO: 18392 - DNA, 21 bp, Homo sapiens
agaaaaagtaytaaaattcag

SEQ ID NO: 18393 - DNA, 21 bp, Homo sapiens
ttcaaactgcytgtctttgaa

SEQ ID NO: 18394 - DNA, 21 bp, Homo sapiens
agaaaagaccytcccagactc

SEQ ID NO: 18395 - DNA, 21 bp, Homo sapiens
aagtgataaargtgttatatg

SEQ ID NO: 18396 - DNA, 21 bp, Homo sapiens
aaagagccaargacttattgc

SEQ ID NO: 18397 - DNA, 21 bp, Homo sapiens
aaatcagggarttcttcacag

SEQ ID NO: 18398 - DNA, 21 bp, Homo sapiens
aagattatctrtctctccaag

SEQ ID NO: 18399 - DNA, 21 bp, Homo sapiens
cctctcattayttgaggactt

SEQ ID NO: 18400 - DNA, 21 bp, Homo sapiens
ggatagagagkatgtgttcct

SEQ ID NO: 18401 - DNA, 21 bp, Homo sapiens
tattatctctrtttttactct

SEQ ID NO: 18402 - DNA, 21 bp, Homo sapiens
caacagatatraagtgctcca

SEQ ID NO: 18403 - DNA, 21 bp, Homo sapiens
tatagatttargttaggcata

SEQ ID NO: 18404 - DNA, 21 bp, Homo sapiens
cctaatggtartgtgtataat

SEQ ID NO: 18405 - DNA, 21 bp, Homo sapiens
tgaactgagargttgatagca

SEQ ID NO: 18406 - DNA, 21 bp, Homo sapiens
ttcttgtattmtcttgttacc

SEQ ID NO: 18407 - DNA, 21 bp, Homo sapiens
gaggcatttcrgcatttcccc

SEQ ID NO: 18408 - DNA, 21 bp, Homo sapiens
tgagtgtctayaccatgtcag

SEQ ID NO: 18409 - DNA, 21 bp, Homo sapiens
aactacagggytttgggtttc

SEQ ID NO: 18410 - DNA, 21 bp, Homo sapiens
aatcttcctcyccaaaccacc

SEQ ID NO: 18411 - DNA, 21 bp, Homo sapiens
gacttagcaargttcacagga

SEQ ID NO: 18412 - DNA, 21 bp, Homo sapiens
aatggtgatgrggatggggat

SEQ ID NO: 18413 - DNA, 21 bp, Homo sapiens
caggccccacktccagcttgg

SEQ ID NO: 18414 - DNA, 21 bp, Homo sapiens
gatattttaargtctgtaacg

SEQ ID NO: 18415 - DNA, 21 bp, Homo sapiens
gctcacctacyagaatgtcta

SEQ ID NO: 18416 - DNA, 21 bp, Homo sapiens
ctagcatcaaygtaacaaatg

SEQ ID NO: 18417 - DNA, 21 bp, Homo sapiens
gactttatgarcatggttaat

SEQ ID NO: 18418 - DNA, 21 bp, Homo sapiens
tattaggaccragggaccatt

SEQ ID NO: 18419 - DNA, 21 bp, Homo sapiens
aatggaatttyctcatttcct

SEQ ID NO: 18420 - DNA, 21 bp, Homo sapiens
aggcatctgtyggggcccagt

SEQ ID NO: 18421 - DNA, 21 bp, Homo sapiens
tatgcaccatrttttctctat

SEQ ID NO: 18422 - DNA, 21 bp, Homo sapiens
gttcattgctrcttgtcagaa

SEQ ID NO: 18423 - DNA, 21 bp, Homo sapiens
caaccttgacrccacagaagg

SEQ ID NO: 18424 - DNA, 21 bp, Homo sapiens
aagacccttgycaagatcagg

SEQ ID NO: 18425 - DNA, 21 bp, Homo sapiens
ccaacttttcytcctccctgt

SEQ ID NO: 18426 - DNA, 21 bp, Homo sapiens
tcgttgtgctmaacacgatgt

SEQ ID NO: 18427 - DNA, 21 bp, Homo sapiens
ttgactgatakttttagaaat

SEQ ID NO: 18428 - DNA, 21 bp, Homo sapiens
agaacaaagaygttcagtact

SEQ ID NO: 18429 - DNA, 21 bp, Homo sapiens
aacacgtggaygcagggttga

SEQ ID NO: 18430 - DNA, 21 bp, Homo sapiens
ttttggaggcrtttgaaagct

SEQ ID NO: 18431 - DNA, 21 bp, Homo sapiens
gaagttacgayttccagataa

SEQ ID NO: 18432 - DNA, 21 bp, Homo sapiens
taaaaatgcgygctttctctt

SEQ ID NO: 18433 - DNA, 21 bp, Homo sapiens
agacatccctrcggaacaaat

SEQ ID NO: 18434 - DNA, 21 bp, Homo sapiens
gggctgaggakagcaggactg

SEQ ID NO: 18435 - DNA, 21 bp, Homo sapiens
ccaaagtgaaraaaatcccaa

SEQ ID NO: 18436 - DNA, 21 bp, Homo sapiens
atagaaaacayttcttacaaa

SEQ ID NO: 18437 - DNA, 21 bp, Homo sapiens
gtttcatagcrctgtcttgaa

SEQ ID NO: 18438 - DNA, 21 bp, Homo sapiens
accttacatcrccatgccaag

SEQ ID NO: 18439 - DNA, 21 bp, Homo sapiens
atacgtcttayatcttcagac

SEQ ID NO: 18440 - DNA, 21 bp, Homo sapiens
agaaaataacragtattaaag

SEQ ID NO: 18441 - DNA, 21 bp, Homo sapiens
gaaggagttcmtctacttgga

SEQ ID NO: 18442 - DNA, 21 bp, Homo sapiens
aaaatgagaamgggaaggtcc

SEQ ID NO: 18443 - DNA, 21 bp, Homo sapiens
aatcttttctrtttattaagt

SEQ ID NO: 18444 - DNA, 21 bp, Homo sapiens
gctaatgattkgttctctaat

SEQ ID NO: 18445 - DNA, 21 bp, Homo sapiens
attcaaaaacrtcagtttctc

SEQ ID NO: 18446 - DNA, 21 bp, Homo sapiens
ctgtgttcatrtaagtttcac

SEQ ID NO: 18447 - DNA, 21 bp, Homo sapiens
ccacattaaamcttctgatca

SEQ ID NO: 18448 - DNA, 21 bp, Homo sapiens
gctcacaaatytactgcatca

SEQ ID NO: 18449 - DNA, 21 bp, Homo sapiens
gtgagtctctrttaaagagaa

SEQ ID NO: 18450 - DNA, 21 bp, Homo sapiens
tgaggggacamgaatcctgaa

SEQ ID NO: 18451 - DNA, 21 bp, Homo sapiens
cttgacatcayttgcttttta

SEQ ID NO: 18452 - DNA, 21 bp, Homo sapiens
ctgctccttcyggatgacgca

SEQ ID NO: 18453 - DNA, 21 bp, Homo sapiens
tttcattcttmactatttcac

SEQ ID NO: 18454 - DNA, 21 bp, Homo sapiens
gcatacacagrttacaaataa

SEQ ID NO: 18455 - DNA, 21 bp, Homo sapiens
tgtttgtcagrtaaaggatct

SEQ ID NO: 18456 - DNA, 21 bp, Homo sapiens
tagcctgtgtmatactgatgg

SEQ ID NO: 18457 - DNA, 21 bp, Homo sapiens
ggtcatcaggrcaactaagac

SEQ ID NO: 18458 - DNA, 21 bp, Homo sapiens
taatagggcarcccagatgca

SEQ ID NO: 18459 - DNA, 21 bp, Homo sapiens
atggcactcayggaagagcaa

SEQ ID NO: 18460 - DNA, 21 bp, Homo sapiens
gtgtcatttcrgcaactggat

SEQ ID NO: 18461 - DNA, 21 bp, Homo sapiens
aagccttcagragcagcgtgc

SEQ ID NO: 18462 - DNA, 21 bp, Homo sapiens
tctgaaactgrgatcctggct

SEQ ID NO: 18463 - DNA, 21 bp, Homo sapiens
cttttggttarcaacaccaat

SEQ ID NO: 18464 - DNA, 21 bp, Homo sapiens
atatgcagagyatctaattca

SEQ ID NO: 18465 - DNA, 21 bp, Homo sapiens
ttgtggtaaarcatcaatagc

SEQ ID NO: 18466 - DNA, 21 bp, Homo sapiens
caatgaagagygaggctttga

SEQ ID NO: 18467 - DNA, 21 bp, Homo sapiens
ttctcctgttrcttctcttct

SEQ ID NO: 18468 - DNA, 21 bp, Homo sapiens
tgcaggttggygactgcaaat

SEQ ID NO: 18469 - DNA, 21 bp, Homo sapiens
atgaaagaatratttttcata

SEQ ID NO: 18470 - DNA, 21 bp, Homo sapiens
ccctctgataytgaaaacaag

SEQ ID NO: 18471 - DNA, 21 bp, Homo sapiens
tttatcttgcrtttccaggga

SEQ ID NO: 18472 - DNA, 21 bp, Homo sapiens
aggtagtgatrgaaaagtaaa

SEQ ID NO: 18473 - DNA, 21 bp, Homo sapiens
gcatttgagayagctgggtag

SEQ ID NO: 18474 - DNA, 21 bp, Homo sapiens
gaaattttccyctgccagaag

SEQ ID NO: 18475 - DNA, 21 bp, Homo sapiens
tatagtcagcyttagtcctgg

SEQ ID NO: 18476 - DNA, 21 bp, Homo sapiens
tgatgagctckagagttgcaa

SEQ ID NO: 18477 - DNA, 21 bp, Homo sapiens
ttaaaattttkttcctacaaa

SEQ ID NO: 18478 - DNA, 21 bp, Homo sapiens
ttaggggctcrcccaggagta

SEQ ID NO: 18479 - DNA, 21 bp, Homo sapiens
catgagtggtragtgcaggtt

SEQ ID NO: 18480 - DNA, 21 bp, Homo sapiens
ttttctctgcmtgtccatcta

SEQ ID NO: 18481 - DNA, 21 bp, Homo sapiens
ttataaaatgyacattatttg

SEQ ID NO: 18482 - DNA, 21 bp, Homo sapiens
tctcccagctygtttttgctt

SEQ ID NO: 18483 - DNA, 21 bp, Homo sapiens
tggtttgggargaagaggttg

SEQ ID NO: 18484 - DNA, 21 bp, Homo sapiens
aactgtttgamgtccagccct

SEQ ID NO: 18485 - DNA, 21 bp, Homo sapiens
attttgattgygcttcaaaac

SEQ ID NO: 18486 - DNA, 21 bp, Homo sapiens
cctgttaggargtcaggtaca

SEQ ID NO: 18487 - DNA, 21 bp, Homo sapiens
attttaaagtygtttcagttg

SEQ ID NO: 18488 - DNA, 21 bp, Homo sapiens
gtgttgaccayagaacagaaa

SEQ ID NO: 18489 - DNA, 21 bp, Homo sapiens
attcttccctrcaggattcat

SEQ ID NO: 18490 - DNA, 21 bp, Homo sapiens
catctccaccraagataaaga

SEQ ID NO: 18491 - DNA, 21 bp, Homo sapiens
acgcggacccygaggagatca

SEQ ID NO: 18492 - DNA, 21 bp, Homo sapiens
ccagtgtcctraaagcatctc

SEQ ID NO: 18493 - DNA, 21 bp, Homo sapiens
tatcaagagamgtgaaatacc

SEQ ID NO: 18494 - DNA, 21 bp, Homo sapiens
ctaatcagccrtactctcttc

SEQ ID NO: 18495 - DNA, 21 bp, Homo sapiens
ttttccctaartacctgatac

SEQ ID NO: 18496 - DNA, 21 bp, Homo sapiens
tgtggaaatayataaagagag

SEQ ID NO: 18497 - DNA, 21 bp, Homo sapiens
ggtgaaccacygtgatagagc

SEQ ID NO: 18498 - DNA, 21 bp, Homo sapiens
tgggcatccaygttaaaatat

SEQ ID NO: 18499 - DNA, 21 bp, Homo sapiens
tctctctttaracaggaccaa

SEQ ID NO: 18500 - DNA, 21 bp, Homo sapiens
ggagagagaayaggaaacatg

SEQ ID NO: 18501 - DNA, 21 bp, Homo sapiens
agcttaaattktgtcatatgt

SEQ ID NO: 18502 - DNA, 21 bp, Homo sapiens
gctatcaactrtttatgttca

SEQ ID NO: 18503 - DNA, 21 bp, Homo sapiens
aaaatatgaayaagaaagagg

SEQ ID NO: 18504 - DNA, 21 bp, Homo sapiens
atactataagrtaatctagaa

SEQ ID NO: 18505 - DNA, 21 bp, Homo sapiens
tgatacataakgtcctcctta

SEQ ID NO: 18506 - DNA, 21 bp, Homo sapiens
aaagctagccragtttgggaa

SEQ ID NO: 18507 - DNA, 21 bp, Homo sapiens
tcacacattcrtccacatctg

SEQ ID NO: 18508 - DNA, 21 bp, Homo sapiens
tttctgaattktctccttggt

SEQ ID NO: 18509 - DNA, 21 bp, Homo sapiens
gcacttacacrtaaacacacc

SEQ ID NO: 18510 - DNA, 21 bp, Homo sapiens
ctttccctgtytcctctttct

SEQ ID NO: 18511 - DNA, 21 bp, Homo sapiens
caagttctagracctaaatta

SEQ ID NO: 18512 - DNA, 21 bp, Homo sapiens
actaagtaaaytgaaggataa

SEQ ID NO: 18513 - DNA, 21 bp, Homo sapiens
gagagcaaatrttatatagca

SEQ ID NO: 18514 - DNA, 21 bp, Homo sapiens
acacagaaaarctgaagtcac

SEQ ID NO: 18515 - DNA, 21 bp, Homo sapiens
ggtccccaggkgtttcaccaa

SEQ ID NO: 18516 - DNA, 21 bp, Homo sapiens
aacctgaaagkatgagactga

SEQ ID NO: 18517 - DNA, 21 bp, Homo sapiens
atattaaagtktagttctgat

SEQ ID NO: 18518 - DNA, 21 bp, Homo sapiens
tttaccattcrccagttctat

SEQ ID NO: 18519 - DNA, 21 bp, Homo sapiens
gctgcattgaytggaacaatt

SEQ ID NO: 18520 - DNA, 21 bp, Homo sapiens
tctctattaamgtctccttca

SEQ ID NO: 18521 - DNA, 21 bp, Homo sapiens
tcttttagatrttgattgagc

SEQ ID NO: 18522 - DNA, 21 bp, Homo sapiens
atagcaatagmgttttctctg

SEQ ID NO: 18523 - DNA, 21 bp, Homo sapiens
tagcctactgytcctaggcta

SEQ ID NO: 18524 - DNA, 21 bp, Homo sapiens
ttaaaggtcartattacaaag

SEQ ID NO: 18525 - DNA, 21 bp, Homo sapiens
attccctattktcctggagca

SEQ ID NO: 18526 - DNA, 21 bp, Homo sapiens
tggcagataarcatctgggtt

SEQ ID NO: 18527 - DNA, 21 bp, Homo sapiens
ctggaaaaaamcttaaaagcc

SEQ ID NO: 18528 - DNA, 21 bp, Homo sapiens
acggacatgcmgaatcaaagc

SEQ ID NO: 18529 - DNA, 21 bp, Homo sapiens
tttctcttccyctctgtcacc

SEQ ID NO: 18530 - DNA, 21 bp, Homo sapiens
aatgagagtgytctggaatgt

SEQ ID NO: 18531 - DNA, 21 bp, Homo sapiens
agatgcaggaracagtccaga

SEQ ID NO: 18532 - DNA, 21 bp, Homo sapiens
gtcttagttcygcccctactt

SEQ ID NO: 18533 - DNA, 21 bp, Homo sapiens
cagctaggatytgacgacagg

SEQ ID NO: 18534 - DNA, 21 bp, Homo sapiens
tagaatgactygggtgctttc

SEQ ID NO: 18535 - DNA, 21 bp, Homo sapiens
ttgtgccctgyggaactcctg

SEQ ID NO: 18536 - DNA, 21 bp, Homo sapiens
agttgtacaaytgatgtgtat

SEQ ID NO: 18537 - DNA, 21 bp, Homo sapiens
tgaacttcccytatccaaagt

SEQ ID NO: 18538 - DNA, 21 bp, Homo sapiens
aattaacacaytggggataag

SEQ ID NO: 18539 - DNA, 21 bp, Homo sapiens
gaccaaggagytttcctcaag

SEQ ID NO: 18540 - DNA, 21 bp, Homo sapiens
tatatgagagmccccaaaggg

SEQ ID NO: 18541 - DNA, 21 bp, Homo sapiens
ttcagtagatmtgatttcaac

SEQ ID NO: 18542 - DNA, 21 bp, Homo sapiens
aggttaacatytaggaaaccc

SEQ ID NO: 18543 - DNA, 21 bp, Homo sapiens
acaagaggacytggatcccaa

SEQ ID NO: 18544 - DNA, 21 bp, Homo sapiens
acctctctggytgtgtggttc

SEQ ID NO: 18545 - DNA, 21 bp, Homo sapiens
atatactattyccttactctt

SEQ ID NO: 18546 - DNA, 21 bp, Homo sapiens
agaggtttttygagaaaaagt

SEQ ID NO: 18547 - DNA, 21 bp, Homo sapiens
aaactcatagytgctgtcttc

SEQ ID NO: 18548 - DNA, 21 bp, Homo sapiens
tttcctatctyttacagaact

SEQ ID NO: 18549 - DNA, 21 bp, Homo sapiens
ggttttcctgrtaactgtggg

SEQ ID NO: 18550 - DNA, 21 bp, Homo sapiens
ggctttcaccrggttgcgggg

SEQ ID NO: 18551 - DNA, 21 bp, Homo sapiens
tgtgacttagytcctttcaga

SEQ ID NO: 18552 - DNA, 21 bp, Homo sapiens
ctggtaggaayagcattggaa

SEQ ID NO: 18553 - DNA, 21 bp, Homo sapiens
cttaggataamaaataaagca

SEQ ID NO: 18554 - DNA, 21 bp, Homo sapiens
aaagatgaaayttatgataga

SEQ ID NO: 18555 - DNA, 21 bp, Homo sapiens
tttctttggtrgtcccttctg

SEQ ID NO: 18556 - DNA, 21 bp, Homo sapiens
cccccattttkcatttatata

SEQ ID NO: 18557 - DNA, 21 bp, Homo sapiens
actctcctaakaacaaatcct

SEQ ID NO: 18558 - DNA, 21 bp, Homo sapiens
cgtgtagactygaggctggcg

SEQ ID NO: 18559 - DNA, 21 bp, Homo sapiens
tttgtagatgygaagagggta

SEQ ID NO: 18560 - DNA, 21 bp, Homo sapiens
agtagaatacrgaaggcgctc

SEQ ID NO: 18561 - DNA, 21 bp, Homo sapiens
agcatgtgaayggtttgattt

SEQ ID NO: 18562 - DNA, 21 bp, Homo sapiens
tcaagagttgyaagggcccag

SEQ ID NO: 18563 - DNA, 21 bp, Homo sapiens
ctacaagaggraagtgccagt

SEQ ID NO: 18564 - DNA, 21 bp, Homo sapiens
ctggatttggraatacaggct

SEQ ID NO: 18565 - DNA, 21 bp, Homo sapiens
ctgggaggcargtactctcac

SEQ ID NO: 18566 - DNA, 21 bp, Homo sapiens
tggctagattytgcatatatt

SEQ ID NO: 18567 - DNA, 21 bp, Homo sapiens
gaatatgttcyaagttccaca

SEQ ID NO: 18568 - DNA, 21 bp, Homo sapiens
cctctcccccragccaatgcc

SEQ ID NO: 18569 - DNA, 21 bp, Homo sapiens
cccctaccctrgggcatgatt

SEQ ID NO: 18570 - DNA, 21 bp, Homo sapiens
taaaatccccracatggtgac

SEQ ID NO: 18571 - DNA, 21 bp, Homo sapiens
ggccactgaayggcactcagg

SEQ ID NO: 18572 - DNA, 21 bp, Homo sapiens
tgttaagagcrtcttaaatca

SEQ ID NO: 18573 - DNA, 21 bp, Homo sapiens
gcaaggcttcycagctggcat

SEQ ID NO: 18574 - DNA, 21 bp, Homo sapiens
gactaatttgygtctgggagt

SEQ ID NO: 18575 - DNA, 21 bp, Homo sapiens
gtaagcataartacatgtttc

SEQ ID NO: 18576 - DNA, 21 bp, Homo sapiens
cattgacattyggctttctcc

SEQ ID NO: 18577 - DNA, 21 bp, Homo sapiens
tttaacaccartgaagtgtta

SEQ ID NO: 18578 - DNA, 21 bp, Homo sapiens
aaacaatcatkgtgtgtttcc

SEQ ID NO: 18579 - DNA, 21 bp, Homo sapiens
aggtccccagytgtcagcata

SEQ ID NO: 18580 - DNA, 21 bp, Homo sapiens
ggtcggctgcycttggaggac

SEQ ID NO: 18581 - DNA, 21 bp, Homo sapiens
catgcaaaatrtgtcatgcaa

SEQ ID NO: 18582 - DNA, 21 bp, Homo sapiens
tttctaagcamcaggaccatt

SEQ ID NO: 18583 - DNA, 21 bp, Homo sapiens
ctaaccataaycacgtacagg

SEQ ID NO: 18584 - DNA, 21 bp, Homo sapiens
agaattctggytgaggttagt

SEQ ID NO: 18585 - DNA, 21 bp, Homo sapiens
attcacggtgratggggagat

SEQ ID NO: 18586 - DNA, 21 bp, Homo sapiens
gaactaccccrataaaatttt

SEQ ID NO: 18587 - DNA, 21 bp, Homo sapiens
ggcccaagaaraacaagattt

SEQ ID NO: 18588 - DNA, 21 bp, Homo sapiens
tatagatattycacattttat

SEQ ID NO: 18589 - DNA, 21 bp, Homo sapiens
gtccaacaacmgattttcaat

SEQ ID NO: 18590 - DNA, 21 bp, Homo sapiens
tacagtaattkttactaacaa

SEQ ID NO: 18591 - DNA, 21 bp, Homo sapiens
actactttatygcaattcttc

SEQ ID NO: 18592 - DNA, 21 bp, Homo sapiens
ttattagtatmattccctacc

SEQ ID NO: 18593 - DNA, 21 bp, Homo sapiens
tgaagagcccrgtaggatctg

SEQ ID NO: 18594 - DNA, 21 bp, Homo sapiens
tagaaattcayttggtggtaa

SEQ ID NO: 18595 - DNA, 21 bp, Homo sapiens
taagtgataargatcaaaaag

SEQ ID NO: 18596 - DNA, 21 bp, Homo sapiens
ccctttatgtrgatgatacac

SEQ ID NO: 18597 - DNA, 21 bp, Homo sapiens
tgccgttcacrcatatccagg

SEQ ID NO: 18598 - DNA, 21 bp, Homo sapiens
ggtgatccagkattctaactg

SEQ ID NO: 18599 - DNA, 21 bp, Homo sapiens
agtaggtgttkttgtgaaatg

SEQ ID NO: 18600 - DNA, 21 bp, Homo sapiens
ggaagggggargcatttcatt

SEQ ID NO: 18601 - DNA, 21 bp, Homo sapiens
tgcctattcaygccctttgtc

SEQ ID NO: 18602 - DNA, 21 bp, Homo sapiens
aggaatagttkgattcagagt

SEQ ID NO: 18603 - DNA, 21 bp, Homo sapiens
ttatttccatkacatcagaat

SEQ ID NO: 18604 - DNA, 21 bp, Homo sapiens
ctatgcctcarttattaagtt

SEQ ID NO: 18605 - DNA, 21 bp, Homo sapiens
tccaaagtctrgctttaatac

SEQ ID NO: 18606 - DNA, 21 bp, Homo sapiens
atacattaagyactgcttaat

SEQ ID NO: 18607 - DNA, 21 bp, Homo sapiens
tgaaaaataakgttggcatgg

SEQ ID NO: 18608 - DNA, 21 bp, Homo sapiens
ccctaaggaaygttctgcctc

SEQ ID NO: 18609 - DNA, 21 bp, Homo sapiens
ttctgaaatckggagtcatct

SEQ ID NO: 18610 - DNA, 21 bp, Homo sapiens
gtctttgggamcaatgaacag

SEQ ID NO: 18611 - DNA, 21 bp, Homo sapiens
ttttctactcrttatcactgg

SEQ ID NO: 18612 - DNA, 21 bp, Homo sapiens
gatgcatttayaggttctggg

SEQ ID NO: 18613 - DNA, 21 bp, Homo sapiens
tgtcattagaktgtgagattc

SEQ ID NO: 18614 - DNA, 21 bp, Homo sapiens
ctattgaaaakaagccagcag

SEQ ID NO: 18615 - DNA, 21 bp, Homo sapiens
ataagatacayaatagtgtag

SEQ ID NO: 18616 - DNA, 21 bp, Homo sapiens
gggcgaaagtrtgcctgtgtg

SEQ ID NO: 18617 - DNA, 21 bp, Homo sapiens
agacatctgcrtggtggtgac

SEQ ID NO: 18618 - DNA, 21 bp, Homo sapiens
gggcagtcagkgcacgtgtgt

SEQ ID NO: 18619 - DNA, 21 bp, Homo sapiens
ctgggtctgtratgctttcct

SEQ ID NO: 18620 - DNA, 21 bp, Homo sapiens
ggttgtcatgyggctccctat

SEQ ID NO: 18621 - DNA, 21 bp, Homo sapiens
ctgggggctcrcggtgactct

SEQ ID NO: 18622 - DNA, 21 bp, Homo sapiens
ccaatagcccygagggtgaat

SEQ ID NO: 18623 - DNA, 21 bp, Homo sapiens
gaggtaaatgyttattggccc

SEQ ID NO: 18624 - DNA, 21 bp, Homo sapiens
tggagaagaaygagaacatct

SEQ ID NO: 18625 - DNA, 21 bp, Homo sapiens
tgggggtggcratgggggatg

SEQ ID NO: 18626 - DNA, 21 bp, Homo sapiens
gggtttctcartttataaatg

SEQ ID NO: 18627 - DNA, 21 bp, Homo sapiens
gcgagtttgcrtagacaggag

SEQ ID NO: 18628 - DNA, 21 bp, Homo sapiens
ctgtcccttcracccccgcaa

SEQ ID NO: 18629 - DNA, 21 bp, Homo sapiens
taggcacataycaacacacgc

SEQ ID NO: 18630 - DNA, 21 bp, Homo sapiens
cactgctaaaygggcacgatg

SEQ ID NO: 18631 - DNA, 21 bp, Homo sapiens
actccagcccrtggaaagcag

SEQ ID NO: 18632 - DNA, 21 bp, Homo sapiens
caaagagtggytttcaaataa

SEQ ID NO: 18633 - DNA, 21 bp, Homo sapiens
aatgtgctgcyccaacctagg

SEQ ID NO: 18634 - DNA, 21 bp, Homo sapiens
ttggttggggrtaaaaggaaa

SEQ ID NO: 18635 - DNA, 21 bp, Homo sapiens
gggactctcakgccaacacac

SEQ ID NO: 18636 - DNA, 21 bp, Homo sapiens
tctgagtctgrtgttggtcca

SEQ ID NO: 18637 - DNA, 21 bp, Homo sapiens
tccctgttcaygagccagcag

SEQ ID NO: 18638 - DNA, 21 bp, Homo sapiens
gccttttactyggcccagtaa

SEQ ID NO: 18639 - DNA, 21 bp, Homo sapiens
gacaccagacragaggaggag

SEQ ID NO: 18640 - DNA, 21 bp, Homo sapiens
aggcaggactygtaagccatc

SEQ ID NO: 18641 - DNA, 21 bp, Homo sapiens
agttgtaggcrgctccggact

SEQ ID NO: 18642 - DNA, 21 bp, Homo sapiens
acagagagagrcagaaaaacc

SEQ ID NO: 18643 - DNA, 21 bp, Homo sapiens
cattcaggagrtgtagggggg

SEQ ID NO: 18644 - DNA, 21 bp, Homo sapiens
cgtaaacatgrtcatatttca

SEQ ID NO: 18645 - DNA, 21 bp, Homo sapiens
ttgggctcgcygtgtagggag

SEQ ID NO: 18646 - DNA, 21 bp, Homo sapiens
tcagcaacccratggagagtc

SEQ ID NO: 18647 - DNA, 21 bp, Homo sapiens
gaatggagacrtggaaccatc

SEQ ID NO: 18648 - DNA, 21 bp, Homo sapiens
acagacgcacrttcagagccc

SEQ ID NO: 18649 - DNA, 21 bp, Homo sapiens
ggagacactcmcagcgtgact

SEQ ID NO: 18650 - DNA, 21 bp, Homo sapiens
gtcaccctcaygtcagtggcc

SEQ ID NO: 18651 - DNA, 21 bp, Homo sapiens
ttgccagaccygggcagatgc

SEQ ID NO: 18652 - DNA, 21 bp, Homo sapiens
ctgaaaccagygctgccgtca

SEQ ID NO: 18653 - DNA, 21 bp, Homo sapiens
ttgtgaagatygattgaggcc

SEQ ID NO: 18654 - DNA, 21 bp, Homo sapiens
cccagaggtaytaaggaaagg

SEQ ID NO: 18655 - DNA, 21 bp, Homo sapiens
tcaaagcctcraacttcagtg

SEQ ID NO: 18656 - DNA, 21 bp, Homo sapiens
aggtggggacrtggacggctg

SEQ ID NO: 18657 - DNA, 21 bp, Homo sapiens
aggcaagtgcygtccgatgcc

SEQ ID NO: 18658 - DNA, 21 bp, Homo sapiens
cctcaactctytgatcggtat

SEQ ID NO: 18659 - DNA, 21 bp, Homo sapiens
gttctagcccragaattgtga

SEQ ID NO: 18660 - DNA, 21 bp, Homo sapiens
cgtggcatgcrtgggggtctg

SEQ ID NO: 18661 - DNA, 21 bp, Homo sapiens
aaagagggatrcaccggtttc

SEQ ID NO: 18662 - DNA, 21 bp, Homo sapiens
tcagcagggamcccatccctg

SEQ ID NO: 18663 - DNA, 21 bp, Homo sapiens
acttctggccrtgacaaatgc

SEQ ID NO: 18664 - DNA, 21 bp, Homo sapiens
ccttctggtcrggactgaaga

SEQ ID NO: 18665 - DNA, 21 bp, Homo sapiens
atgcagagcamccccatggcc

SEQ ID NO: 18666 - DNA, 21 bp, Homo sapiens
gggcgacagcrgtggtgctga

SEQ ID NO: 18667 - DNA, 21 bp, Homo sapiens
cccccccccgkaaaagggcct

SEQ ID NO: 18668 - DNA, 21 bp, Homo sapiens
tttctagctcrttggttcttg

SEQ ID NO: 18669 - DNA, 21 bp, Homo sapiens
gccaggcctcyttggaaagtg

SEQ ID NO: 18670 - DNA, 21 bp, Homo sapiens
ccttacctccygtcagctcct

SEQ ID NO: 18671 - DNA, 21 bp, Homo sapiens
atactgtatcmcactggggca

SEQ ID NO: 18672 - DNA, 21 bp, Homo sapiens
cactggcgcgyttggctcagg

SEQ ID NO: 18673 - DNA, 21 bp, Homo sapiens
cttcatgggcrcatttcatgg

SEQ ID NO: 18674 - DNA, 21 bp, Homo sapiens
cccagcagaartggcgctttc

SEQ ID NO: 18675 - DNA, 21 bp, Homo sapiens
attggcatctytcgcctccgg

SEQ ID NO: 18676 - DNA, 21 bp, Homo sapiens
tgtagtggctrggaggacggg

SEQ ID NO: 18677 - DNA, 21 bp, Homo sapiens
agagaacaccrcatgctggaa

SEQ ID NO: 18678 - DNA, 21 bp, Homo sapiens
gagcctgtacrtaaacctgta

SEQ ID NO: 18679 - DNA, 21 bp, Homo sapiens
acttgctgtcragggctaaca

SEQ ID NO: 18680 - DNA, 21 bp, Homo sapiens
ctagtgcaaaygctactcttc

SEQ ID NO: 18681 - DNA, 21 bp, Homo sapiens
agattcctggmttctctgcga

SEQ ID NO: 18682 - DNA, 21 bp, Homo sapiens
catagccgagkttcctccgca

SEQ ID NO: 18683 - DNA, 21 bp, Homo sapiens
ttgtttaggartaaaatggct

SEQ ID NO: 18684 - DNA, 21 bp, Homo sapiens
tttctcttttkggggaggggg

SEQ ID NO: 18685 - DNA, 21 bp, Homo sapiens
ttttttttctytttttgagac

SEQ ID NO: 18686 - DNA, 21 bp, Homo sapiens
tacctgtaacyggtccttgtc

SEQ ID NO: 18687 - DNA, 21 bp, Homo sapiens
ctttagatgtytcaataacag

SEQ ID NO: 18688 - DNA, 21 bp, Homo sapiens
tttgggctctraagtgaagtc

SEQ ID NO: 18689 - DNA, 21 bp, Homo sapiens
tacagaaaaaytgagggaaag

SEQ ID NO: 18690 - DNA, 21 bp, Homo sapiens
tctccagtggraaaaaaaaat

SEQ ID NO: 18691 - DNA, 21 bp, Homo sapiens
acttctatcckatgattctgg

SEQ ID NO: 18692 - DNA, 21 bp, Homo sapiens
ggagtcagccytgaatacacc

SEQ ID NO: 18693 - DNA, 21 bp, Homo sapiens
gagaacagctycaaggggagt

SEQ ID NO: 18694 - DNA, 21 bp, Homo sapiens
aaagctttttyttaagtgact

SEQ ID NO: 18695 - DNA, 21 bp, Homo sapiens
cacctaaataragagagaaaa

SEQ ID NO: 18696 - DNA, 21 bp, Homo sapiens
gagaagcaaargagtgagaag

SEQ ID NO: 18697 - DNA, 21 bp, Homo sapiens
aaagatgttcyagggctattt

SEQ ID NO: 18698 - DNA, 21 bp, Homo sapiens
gttgaatacargaatacttga

SEQ ID NO: 18699 - DNA, 21 bp, Homo sapiens
aagaaaactgrattttcacaa

SEQ ID NO: 18700 - DNA, 21 bp, Homo sapiens
aaagacacagrtgataaactt

SEQ ID NO: 18701 - DNA, 21 bp, Homo sapiens
aacagcatttktagtttgtat

SEQ ID NO: 18702 - DNA, 21 bp, Homo sapiens
caggacattcytctctgatcc

SEQ ID NO: 18703 - DNA, 21 bp, Homo sapiens
gagtaagctgygttaaaccca

SEQ ID NO: 18704 - DNA, 21 bp, Homo sapiens
ctatggccgcygctggctggg

SEQ ID NO: 18705 - DNA, 21 bp, Homo sapiens
aacacagttayacattaagtg

SEQ ID NO: 18706 - DNA, 21 bp, Homo sapiens
aggtcagatgmtctggttgtg

SEQ ID NO: 18707 - DNA, 21 bp, Homo sapiens
ttacattcccrcctcccaccc

SEQ ID NO: 18708 - DNA, 21 bp, Homo sapiens
caaagcaccakgcacacagct

SEQ ID NO: 18709 - DNA, 21 bp, Homo sapiens
gctggggggcrctaggagatt

SEQ ID NO: 18710 - DNA, 21 bp, Homo sapiens
gactccagccyatccagaaca

SEQ ID NO: 18711 - DNA, 21 bp, Homo sapiens
actgggaccaygaaccagccc

SEQ ID NO: 18712 - DNA, 21 bp, Homo sapiens
ggagttaatgrcttgtgacaa

SEQ ID NO: 18713 - DNA, 21 bp, Homo sapiens
agttgtccctygaatccctcc

SEQ ID NO: 18714 - DNA, 21 bp, Homo sapiens
tcctctgttaygaactgaatg

SEQ ID NO: 18715 - DNA, 21 bp, Homo sapiens
atgcttttgtycttcctctct

SEQ ID NO: 18716 - DNA, 21 bp, Homo sapiens
cttttcttccygagccgaatc

SEQ ID NO: 18717 - DNA, 21 bp, Homo sapiens
acactggtcayttggaaggct

SEQ ID NO: 18718 - DNA, 21 bp, Homo sapiens
ttttcttattyacagctcgaa

SEQ ID NO: 18719 - DNA, 21 bp, Homo sapiens
ttgaaccttayaggataactt

SEQ ID NO: 18720 - DNA, 21 bp, Homo sapiens
gattataactmagtttggtga

SEQ ID NO: 18721 - DNA, 21 bp, Homo sapiens
tttttttcatytgagaaagac

SEQ ID NO: 18722 - DNA, 21 bp, Homo sapiens
tctcataaaaytctcaggatg

SEQ ID NO: 18723 - DNA, 21 bp, Homo sapiens
ttcctacccarccggttggag

SEQ ID NO: 18724 - DNA, 21 bp, Homo sapiens
gcttctttctyctgcctgcaa

SEQ ID NO: 18725 - DNA, 21 bp, Homo sapiens
ccctaccgagyggagaaagtc

SEQ ID NO: 18726 - DNA, 21 bp, Homo sapiens
cacctctttcyccctttcacc

SEQ ID NO: 18727 - DNA, 21 bp, Homo sapiens
aagtaggcagragggagaggg

SEQ ID NO: 18728 - DNA, 21 bp, Homo sapiens
agtatgaggayggaatgttcc

SEQ ID NO: 18729 - DNA, 21 bp, Homo sapiens
accagttgccrttgagggttt

SEQ ID NO: 18730 - DNA, 21 bp, Homo sapiens
acgctttgcaragagcccagg

SEQ ID NO: 18731 - DNA, 21 bp, Homo sapiens
tggggattagrtgtctctgct

SEQ ID NO: 18732 - DNA, 21 bp, Homo sapiens
acgtgctattygactcaacgt

SEQ ID NO: 18733 - DNA, 21 bp, Homo sapiens
acatggctgtkgtgtctctgg

SEQ ID NO: 18734 - DNA, 21 bp, Homo sapiens
gcgtcgagggrtcatgtgagt

SEQ ID NO: 18735 - DNA, 21 bp, Homo sapiens
gaagttcttcygcccaaacac

SEQ ID NO: 18736 - DNA, 21 bp, Homo sapiens
tcaacaaacaracagacagac

SEQ ID NO: 18737 - DNA, 21 bp, Homo sapiens
caaacatcggrtgaattcgac

SEQ ID NO: 18738 - DNA, 21 bp, Homo sapiens
gcaggcactgmcctcctcttc

SEQ ID NO: 18739 - DNA, 21 bp, Homo sapiens
tgtaggtgctrcctgacatat

SEQ ID NO: 18740 - DNA, 21 bp, Homo sapiens
gtgaaatgttygttagctgta

SEQ ID NO: 18741 - DNA, 21 bp, Homo sapiens
gtctcaggatyaaaggactca

SEQ ID NO: 18742 - DNA, 21 bp, Homo sapiens
attctctctcyggttttttga

SEQ ID NO: 18743 - DNA, 21 bp, Homo sapiens
aattaggcgargggatccaag

SEQ ID NO: 18744 - DNA, 21 bp, Homo sapiens
ttctagtgaaygtcaaacttc

SEQ ID NO: 18745 - DNA, 21 bp, Homo sapiens
tataatttcakcagcaggaag

SEQ ID NO: 18746 - DNA, 21 bp, Homo sapiens
actgctgttamttgtatgttt

SEQ ID NO: 18747 - DNA, 21 bp, Homo sapiens
aaaataatgaytgaatttagc

SEQ ID NO: 18748 - DNA, 21 bp, Homo sapiens
taaaataacamccaggtttcc

SEQ ID NO: 18749 - DNA, 21 bp, Homo sapiens
tgatgcatgtrgctgaagcca

SEQ ID NO: 18750 - DNA, 21 bp, Homo sapiens
agttgagtttygtggatattt

SEQ ID NO: 18751 - DNA, 21 bp, Homo sapiens
ctattgggggyattataaatg

SEQ ID NO: 18752 - DNA, 21 bp, Homo sapiens
ataaatcattygtttattcat

SEQ ID NO: 18753 - DNA, 21 bp, Homo sapiens
tctataaaaaygtttgtgaca

SEQ ID NO: 18754 - DNA, 21 bp, Homo sapiens
ttaatggaatktctggaggaa

SEQ ID NO: 18755 - DNA, 21 bp, Homo sapiens
ttgaggtgccrgattctagca

SEQ ID NO: 18756 - DNA, 21 bp, Homo sapiens
tccagtatggmgatgaaacca

SEQ ID NO: 18757 - DNA, 21 bp, Homo sapiens
cacctggctcmaaagcatctt

SEQ ID NO: 18758 - DNA, 21 bp, Homo sapiens
ataatcccacrtactgttttt

SEQ ID NO: 18759 - DNA, 21 bp, Homo sapiens
taaatattacrgcaccatttg

SEQ ID NO: 18760 - DNA, 21 bp, Homo sapiens
ttaaaactgayttaaagaaaa

SEQ ID NO: 18761 - DNA, 21 bp, Homo sapiens
ctccactgcarcacaactcgc

SEQ ID NO: 18762 - DNA, 21 bp, Homo sapiens
taactcatccygattcaccgc

SEQ ID NO: 18763 - DNA, 21 bp, Homo sapiens
ccacatggcarctggcagctt

SEQ ID NO: 18764 - DNA, 21 bp, Homo sapiens
gtctgtcttcmtgcactgtaa

SEQ ID NO: 18765 - DNA, 21 bp, Homo sapiens
aggctgaaaartagcccagat

SEQ ID NO: 18766 - DNA, 21 bp, Homo sapiens
acaaactggtytgaaagtcca

SEQ ID NO: 18767 - DNA, 21 bp, Homo sapiens
tgtgtgcagaygccctctttc

SEQ ID NO: 18768 - DNA, 21 bp, Homo sapiens
aggagttatcrgtctaagagt

SEQ ID NO: 18769 - DNA, 21 bp, Homo sapiens
cccattcccarataacggttg

SEQ ID NO: 18770 - DNA, 21 bp, Homo sapiens
taaagcctagrattgaaacag

SEQ ID NO: 18771 - DNA, 21 bp, Homo sapiens
cgttatattgygattcattca

SEQ ID NO: 18772 - DNA, 21 bp, Homo sapiens
ttactcccccrtcaccaggca

SEQ ID NO: 18773 - DNA, 21 bp, Homo sapiens
tgagggttgtmgttctggctt

SEQ ID NO: 18774 - DNA, 21 bp, Homo sapiens
ggttcgccacrcgcagagctc

SEQ ID NO: 18775 - DNA, 21 bp, Homo sapiens
tagaaacaacrtacagaattg

SEQ ID NO: 18776 - DNA, 21 bp, Homo sapiens
ggactcccatyggataccaaa

SEQ ID NO: 18777 - DNA, 21 bp, Homo sapiens
gtagggagaaytttcaatcta

SEQ ID NO: 18778 - DNA, 21 bp, Homo sapiens
tgaggagttgraatgatggca

SEQ ID NO: 18779 - DNA, 21 bp, Homo sapiens
ctagaagttcrtattttcttg

SEQ ID NO: 18780 - DNA, 21 bp, Homo sapiens
ttctgttccaygggaggtcta

SEQ ID NO: 18781 - DNA, 21 bp, Homo sapiens
atgtcaccttrgagagcttga

SEQ ID NO: 18782 - DNA, 21 bp, Homo sapiens
aatgagagaamgcgtagatcg

SEQ ID NO: 18783 - DNA, 21 bp, Homo sapiens
ccttatactcrgcagttcatt

SEQ ID NO: 18784 - DNA, 21 bp, Homo sapiens
aagctgttccyaaccttaatt

SEQ ID NO: 18785 - DNA, 21 bp, Homo sapiens
atatttgatgmaaagtgagac

SEQ ID NO: 18786 - DNA, 21 bp, Homo sapiens
gcctcccagcratgtgtgtac

SEQ ID NO: 18787 - DNA, 21 bp, Homo sapiens
tcgaatgtccygagggaaaga

SEQ ID NO: 18788 - DNA, 21 bp, Homo sapiens
ggtcctaggcyacctttcccg

SEQ ID NO: 18789 - DNA, 21 bp, Homo sapiens
atagacaaacrggtgttggct

SEQ ID NO: 18790 - DNA, 21 bp, Homo sapiens
tttctggcagkactctagcat

SEQ ID NO: 18791 - DNA, 21 bp, Homo sapiens
tgttttcttcyttacccgcac

SEQ ID NO: 18792 - DNA, 21 bp, Homo sapiens
aatagatcttrtatacaaata

SEQ ID NO: 18793 - DNA, 21 bp, Homo sapiens
ctctggcagcraccctctcca

SEQ ID NO: 18794 - DNA, 21 bp, Homo sapiens
aaatgttaatmattgcactaa

SEQ ID NO: 18795 - DNA, 21 bp, Homo sapiens
atacaaaaatmtaaagtccag

SEQ ID NO: 18796 - DNA, 21 bp, Homo sapiens
agcaccagagkttaacagata

SEQ ID NO: 18797 - DNA, 21 bp, Homo sapiens
tcatacatatraataaaaagg

SEQ ID NO: 18798 - DNA, 21 bp, Homo sapiens
aaacctcagcrccagcactgg

SEQ ID NO: 18799 - DNA, 21 bp, Homo sapiens
tggacagactytcgtgttggc

SEQ ID NO: 18800 - DNA, 21 bp, Homo sapiens
atgatctaccrtatgtctcca

SEQ ID NO: 18801 - DNA, 21 bp, Homo sapiens
ttaagataagrtcttcagaaa

SEQ ID NO: 18802 - DNA, 21 bp, Homo sapiens
ttcttcttccyattttcctga

SEQ ID NO: 18803 - DNA, 21 bp, Homo sapiens
tattgcttctrttagcttgat

SEQ ID NO: 18804 - DNA, 21 bp, Homo sapiens
tgcacatccayaccctgtggg

SEQ ID NO: 18805 - DNA, 21 bp, Homo sapiens
gtttgagcccygcgccggctt

SEQ ID NO: 18806 - DNA, 21 bp, Homo sapiens
agttagcaaaytctgacagtt

SEQ ID NO: 18807 - DNA, 21 bp, Homo sapiens
cattattcatmtcctagcatg

SEQ ID NO: 18808 - DNA, 21 bp, Homo sapiens
cttcaggagartagggttaag

SEQ ID NO: 18809 - DNA, 21 bp, Homo sapiens
tccgtggcagrtttatggtag

SEQ ID NO: 18810 - DNA, 21 bp, Homo sapiens
tatccagttcygttcagctgg

SEQ ID NO: 18811 - DNA, 21 bp, Homo sapiens
tgctaacacartaaagctcac

SEQ ID NO: 18812 - DNA, 21 bp, Homo sapiens
gatggccaaamacctcatggt

SEQ ID NO: 18813 - DNA, 21 bp, Homo sapiens
gattttatttkcaggatccca

SEQ ID NO: 18814 - DNA, 21 bp, Homo sapiens
taaaggtggcrttttgtttgg

SEQ ID NO: 18815 - DNA, 21 bp, Homo sapiens
gagctgtaggracttaaaaac

SEQ ID NO: 18816 - DNA, 21 bp, Homo sapiens
atgtaagaaartctgacatct

SEQ ID NO: 18817 - DNA, 21 bp, Homo sapiens
atgggaggacrgggtggctgc

SEQ ID NO: 18818 - DNA, 21 bp, Homo sapiens
agtcttgtctytccaaaccca

SEQ ID NO: 18819 - DNA, 21 bp, Homo sapiens
ttcagcctaayatagtcctag

SEQ ID NO: 18820 - DNA, 21 bp, Homo sapiens
gtctaagtctycaagaggcta

SEQ ID NO: 18821 - DNA, 21 bp, Homo sapiens
gaccatcaccyctgaaaaact

SEQ ID NO: 18822 - DNA, 21 bp, Homo sapiens
tctcttgaatyttaatgcaaa

SEQ ID NO: 18823 - DNA, 21 bp, Homo sapiens
tatcagttttyccccatatta

SEQ ID NO: 18824 - DNA, 21 bp, Homo sapiens
tgtgatttgcmtaccattgtt

SEQ ID NO: 18825 - DNA, 21 bp, Homo sapiens
ttcctgttgcrtgggcagttg

SEQ ID NO: 18826 - DNA, 21 bp, Homo sapiens
attatacttgktacagtactt

SEQ ID NO: 18827 - DNA, 21 bp, Homo sapiens
ctccctctccyctgagctcca

SEQ ID NO: 18828 - DNA, 21 bp, Homo sapiens
gatatggtctrtattggcatt

SEQ ID NO: 18829 - DNA, 21 bp, Homo sapiens
tgagagaaaayccaacatttc

SEQ ID NO: 18830 - DNA, 21 bp, Homo sapiens
ctgacatgctyatgcttgtct

SEQ ID NO: 18831 - DNA, 21 bp, Homo sapiens
caaaatagtcyattgacaggt

SEQ ID NO: 18832 - DNA, 21 bp, Homo sapiens
ttgcaataatktagcccactc

SEQ ID NO: 18833 - DNA, 21 bp, Homo sapiens
tgggtgctccrtttgttccct

SEQ ID NO: 18834 - DNA, 21 bp, Homo sapiens
agattctgggracacatgtac

SEQ ID NO: 18835 - DNA, 21 bp, Homo sapiens
ctaaatgttckataacacgta

SEQ ID NO: 18836 - DNA, 21 bp, Homo sapiens
tctttctcaarctctctcatt

SEQ ID NO: 18837 - DNA, 21 bp, Homo sapiens
ggccagcagayagcttactta

SEQ ID NO: 18838 - DNA, 21 bp, Homo sapiens
atgaatagctrtgtgaccctg

SEQ ID NO: 18839 - DNA, 21 bp, Homo sapiens
gcaattgtgtytctcaagcaa

SEQ ID NO: 18840 - DNA, 21 bp, Homo sapiens
tcgaagtcagktgctcagcat

SEQ ID NO: 18841 - DNA, 21 bp, Homo sapiens
tgatcatattyacatgaccag

SEQ ID NO: 18842 - DNA, 21 bp, Homo sapiens
agacgggtgartttttacagt

SEQ ID NO: 18843 - DNA, 21 bp, Homo sapiens
ctgtatagccrttgtcctggt

SEQ ID NO: 18844 - DNA, 21 bp, Homo sapiens
aatcctatttrataggatttc

SEQ ID NO: 18845 - DNA, 21 bp, Homo sapiens
ctggacaatcrttagaataag

SEQ ID NO: 18846 - DNA, 21 bp, Homo sapiens
agcctccccarttaacaatgt

SEQ ID NO: 18847 - DNA, 21 bp, Homo sapiens
taactgtcccmctttccgtat

SEQ ID NO: 18848 - DNA, 21 bp, Homo sapiens
tgtttcagccratgacagtga

SEQ ID NO: 18849 - DNA, 21 bp, Homo sapiens
ataacgatagmcattctcttt

SEQ ID NO: 18850 - DNA, 21 bp, Homo sapiens
ctcattagagytcattcttgg

SEQ ID NO: 18851 - DNA, 21 bp, Homo sapiens
aaatattattrtagagtactc

SEQ ID NO: 18852 - DNA, 21 bp, Homo sapiens
tctagggactyagaaagaact

SEQ ID NO: 18853 - DNA, 21 bp, Homo sapiens
gtagaaagaaractttttttg

SEQ ID NO: 18854 - DNA, 21 bp, Homo sapiens
gtgttacggtyatcactagat

SEQ ID NO: 18855 - DNA, 21 bp, Homo sapiens
tgtggttaaaytgtttgccca

SEQ ID NO: 18856 - DNA, 21 bp, Homo sapiens
ccctggtttcycattctctcc

SEQ ID NO: 18857 - DNA, 21 bp, Homo sapiens
tttacaacacrggatatttac

SEQ ID NO: 18858 - DNA, 21 bp, Homo sapiens
ttaggaaagayggtagaggta

SEQ ID NO: 18859 - DNA, 21 bp, Homo sapiens
gaagctgttgyacgttatggc

SEQ ID NO: 18860 - DNA, 21 bp, Homo sapiens
tgcttataaaygatcttgtga

SEQ ID NO: 18861 - DNA, 21 bp, Homo sapiens
agaatggtcartattataaaa

SEQ ID NO: 18862 - DNA, 21 bp, Homo sapiens
cctaattcacraaacaccaca

SEQ ID NO: 18863 - DNA, 21 bp, Homo sapiens
atggtaagggyagtaatatac

SEQ ID NO: 18864 - DNA, 21 bp, Homo sapiens
tttgccttccytgctgccatt

SEQ ID NO: 18865 - DNA, 21 bp, Homo sapiens
tggagaaagtrtagcatttta

SEQ ID NO: 18866 - DNA, 21 bp, Homo sapiens
aggtgagtggytcaactttct

SEQ ID NO: 18867 - DNA, 21 bp, Homo sapiens
gtcaaagacayggatacagag

SEQ ID NO: 18868 - DNA, 21 bp, Homo sapiens
aacctggtaayattaggtgga

SEQ ID NO: 18869 - DNA, 21 bp, Homo sapiens
attatttcgcrgctaggtctt

SEQ ID NO: 18870 - DNA, 21 bp, Homo sapiens
catatctgacrtgatagcatc

SEQ ID NO: 18871 - DNA, 21 bp, Homo sapiens
gcctgaggatkgtcagtagca

SEQ ID NO: 18872 - DNA, 21 bp, Homo sapiens
tgttccaatgygcaacttcag

SEQ ID NO: 18873 - DNA, 21 bp, Homo sapiens
ccatttcagtrtatggagtgg

SEQ ID NO: 18874 - DNA, 21 bp, Homo sapiens
tttcagctctrctatttactc

SEQ ID NO: 18875 - DNA, 21 bp, Homo sapiens
tgtgaagactrtgcatgtcac

SEQ ID NO: 18876 - DNA, 21 bp, Homo sapiens
attcagagacraagaaaacac

SEQ ID NO: 18877 - DNA, 21 bp, Homo sapiens
gatgaatgccygctttagccc

SEQ ID NO: 18878 - DNA, 21 bp, Homo sapiens
aagcatttacrgatcagagtc

SEQ ID NO: 18879 - DNA, 21 bp, Homo sapiens
gtttgaatgartacgtcattg

SEQ ID NO: 18880 - DNA, 21 bp, Homo sapiens
ccactcaggcrgcggctaatg

SEQ ID NO: 18881 - DNA, 21 bp, Homo sapiens
gcaacctgctycaaccaggac

SEQ ID NO: 18882 - DNA, 21 bp, Homo sapiens
actccccaccygctccttgtg

SEQ ID NO: 18883 - DNA, 21 bp, Homo sapiens
gctgctgtgcytgagacaaag

SEQ ID NO: 18884 - DNA, 21 bp, Homo sapiens
aactcattttktacttcagta

SEQ ID NO: 18885 - DNA, 21 bp, Homo sapiens
gcatctccctyacagatctct

SEQ ID NO: 18886 - DNA, 21 bp, Homo sapiens
tctttttaccragtctcctga

SEQ ID NO: 18887 - DNA, 21 bp, Homo sapiens
gaaatatctgytgttgaattt

SEQ ID NO: 18888 - DNA, 21 bp, Homo sapiens
aggtttatgayatagaatgga

SEQ ID NO: 18889 - DNA, 21 bp, Homo sapiens
aagggatagaygaatctaacc

SEQ ID NO: 18890 - DNA, 21 bp, Homo sapiens
cttgtgactgyggatgtccat

SEQ ID NO: 18891 - DNA, 21 bp, Homo sapiens
gctcctctcckctctctggcc

SEQ ID NO: 18892 - DNA, 21 bp, Homo sapiens
acttttcttcyatccctcttc

SEQ ID NO: 18893 - DNA, 21 bp, Homo sapiens
ccactgtctaytcttgaattc

SEQ ID NO: 18894 - DNA, 21 bp, Homo sapiens
gaatcccaggkcgttatttct

SEQ ID NO: 18895 - DNA, 21 bp, Homo sapiens
ggagggatccytcatttctca

SEQ ID NO: 18896 - DNA, 21 bp, Homo sapiens
tcaacgacacytctcttatca

SEQ ID NO: 18897 - DNA, 21 bp, Homo sapiens
taaggtgtgtktgtatgtttg

SEQ ID NO: 18898 - DNA, 21 bp, Homo sapiens
gaagacaactrcacatggggt

SEQ ID NO: 18899 - DNA, 21 bp, Homo sapiens
cagatgctgargtaagagttt

SEQ ID NO: 18900 - DNA, 21 bp, Homo sapiens
cagctctccartaagcaagag

SEQ ID NO: 18901 - DNA, 21 bp, Homo sapiens
cttgaactctyttcttttaat

SEQ ID NO: 18902 - DNA, 21 bp, Homo sapiens
agtcattagakcccaggaccc

SEQ ID NO: 18903 - DNA, 21 bp, Homo sapiens
atgtagatgtyatacataaga

SEQ ID NO: 18904 - DNA, 21 bp, Homo sapiens
aagccttaacraatttaaagg

SEQ ID NO: 18905 - DNA, 21 bp, Homo sapiens
gactgcctgargtttgatttt

SEQ ID NO: 18906 - DNA, 21 bp, Homo sapiens
tggaagatgcrcttttttaga

SEQ ID NO: 18907 - DNA, 21 bp, Homo sapiens
ctgtccaacarttcctactgg

SEQ ID NO: 18908 - DNA, 21 bp, Homo sapiens
atgtgtagacyggcaaaggca

SEQ ID NO: 18909 - DNA, 21 bp, Homo sapiens
ctttcagtaaygagaccaaag

SEQ ID NO: 18910 - DNA, 21 bp, Homo sapiens
tggttgtggarcatatacatc

SEQ ID NO: 18911 - DNA, 21 bp, Homo sapiens
agcttagcttygaattatttc

SEQ ID NO: 18912 - DNA, 21 bp, Homo sapiens
cccttcatcarctgaggaaca

SEQ ID NO: 18913 - DNA, 21 bp, Homo sapiens
ggtactgttgrtaactctgga

SEQ ID NO: 18914 - DNA, 21 bp, Homo sapiens
tagaaatattygagataggtt

SEQ ID NO: 18915 - DNA, 21 bp, Homo sapiens
gcaaaatcaakgtaaggataa

SEQ ID NO: 18916 - DNA, 21 bp, Homo sapiens
ttattgtctcrctgctaagta

SEQ ID NO: 18917 - DNA, 21 bp, Homo sapiens
tgatattcacmgaacaccaat

SEQ ID NO: 18918 - DNA, 21 bp, Homo sapiens
taactgtgagmcaaaagcagg

SEQ ID NO: 18919 - DNA, 21 bp, Homo sapiens
actgacccttyaaattccata

SEQ ID NO: 18920 - DNA, 21 bp, Homo sapiens
ccactatcctyaggatctttc

SEQ ID NO: 18921 - DNA, 21 bp, Homo sapiens
aaaaaaataaygcttctatga

SEQ ID NO: 18922 - DNA, 21 bp, Homo sapiens
agaattatatyatcatttata

SEQ ID NO: 18923 - DNA, 21 bp, Homo sapiens
caagtttgtgrcacatttttt

SEQ ID NO: 18924 - DNA, 21 bp, Homo sapiens
tagatcaaccytaagtaaaag

SEQ ID NO: 18925 - DNA, 21 bp, Homo sapiens
acatggaaaakttgtggggct

SEQ ID NO: 18926 - DNA, 21 bp, Homo sapiens
gattttaagtrttgtctgtac

SEQ ID NO: 18927 - DNA, 21 bp, Homo sapiens
tctgttcaaaygttcatcagc

SEQ ID NO: 18928 - DNA, 21 bp, Homo sapiens
tccatttctargttgactaat

SEQ ID NO: 18929 - DNA, 21 bp, Homo sapiens
gctcctgtttyactaaggaaa

SEQ ID NO: 18930 - DNA, 21 bp, Homo sapiens
ttgaatgaccrtccagtgttt

SEQ ID NO: 18931 - DNA, 21 bp, Homo sapiens
ttcagaattamaatctttacc

SEQ ID NO: 18932 - DNA, 21 bp, Homo sapiens
aaattgcatckcactgtacac

SEQ ID NO: 18933 - DNA, 21 bp, Homo sapiens
aaggctcttgytggaaaccat

SEQ ID NO: 18934 - DNA, 21 bp, Homo sapiens
tattggtactrttaactgcca

SEQ ID NO: 18935 - DNA, 21 bp, Homo sapiens
cacttcccacygaacctgagc

SEQ ID NO: 18936 - DNA, 21 bp, Homo sapiens
ttttttttccrtttcctattc

SEQ ID NO: 18937 - DNA, 21 bp, Homo sapiens
tcctatttcaytggtctcttc

SEQ ID NO: 18938 - DNA, 21 bp, Homo sapiens
aggagcctctkcatactcctt

SEQ ID NO: 18939 - DNA, 21 bp, Homo sapiens
taatattagargttggggcaa

SEQ ID NO: 18940 - DNA, 21 bp, Homo sapiens
aaaatgatttktacttcattc

SEQ ID NO: 18941 - DNA, 21 bp, Homo sapiens
ccttagaaatrcttttttcca

SEQ ID NO: 18942 - DNA, 21 bp, Homo sapiens
gcgaggggagmaattgccctc

SEQ ID NO: 18943 - DNA, 21 bp, Homo sapiens
ttgtgatctcrttcacattaa

SEQ ID NO: 18944 - DNA, 21 bp, Homo sapiens
ctctctgagcrtccttgaaga

SEQ ID NO: 18945 - DNA, 21 bp, Homo sapiens
ttgagatgaartggttccacc

SEQ ID NO: 18946 - DNA, 21 bp, Homo sapiens
acagaagacamtccgtatttg

SEQ ID NO: 18947 - DNA, 21 bp, Homo sapiens
caaggttgacrtatgaatctc

SEQ ID NO: 18948 - DNA, 21 bp, Homo sapiens
tttgagggttrttttgattgg

SEQ ID NO: 18949 - DNA, 21 bp, Homo sapiens
ttatcattttyttacatggct

SEQ ID NO: 18950 - DNA, 21 bp, Homo sapiens
tgccattagtrtactcttcac

SEQ ID NO: 18951 - DNA, 21 bp, Homo sapiens
tcgagtctgartttaaaacta

SEQ ID NO: 18952 - DNA, 21 bp, Homo sapiens
gaacaagtcaktcagcgtctc

SEQ ID NO: 18953 - DNA, 21 bp, Homo sapiens
ctgtgtgcacraggattttgc

SEQ ID NO: 18954 - DNA, 21 bp, Homo sapiens
atgataactcrattagcctgt

SEQ ID NO: 18955 - DNA, 21 bp, Homo sapiens
aagtgttgagrtaacaatcat

SEQ ID NO: 18956 - DNA, 21 bp, Homo sapiens
attagttaacrtcttccgcca

SEQ ID NO: 18957 - DNA, 21 bp, Homo sapiens
agaactaaccyggtctggcca

SEQ ID NO: 18958 - DNA, 21 bp, Homo sapiens
cagagataagyacggttcacc

SEQ ID NO: 18959 - DNA, 21 bp, Homo sapiens
ttgggagcgtratgtaagatg

SEQ ID NO: 18960 - DNA, 21 bp, Homo sapiens
tgagatcccayagacagagcg

SEQ ID NO: 18961 - DNA, 21 bp, Homo sapiens
gtatgtatctycaaatctttt

SEQ ID NO: 18962 - DNA, 21 bp, Homo sapiens
tgctccccatkggtcacgtgg

SEQ ID NO: 18963 - DNA, 21 bp, Homo sapiens
cccagcctctyagggttcagg

SEQ ID NO: 18964 - DNA, 21 bp, Homo sapiens
cctgtttcagkatcctctgtc

SEQ ID NO: 18965 - DNA, 21 bp, Homo sapiens
ataaacaggayagaggaaggg

SEQ ID NO: 18966 - DNA, 21 bp, Homo sapiens
ggtgagacacktagaagaact

SEQ ID NO: 18967 - DNA, 21 bp, Homo sapiens
gtggcagtccygttttcctag

SEQ ID NO: 18968 - DNA, 21 bp, Homo sapiens
ctgatcctcarcacaaccaat

SEQ ID NO: 18969 - DNA, 21 bp, Homo sapiens
cgatgggcacygtgtgaagaa

SEQ ID NO: 18970 - DNA, 21 bp, Homo sapiens
tgtgtggagtrttcacttctg

SEQ ID NO: 18971 - DNA, 21 bp, Homo sapiens
ggccccctgcyggcttcagca

SEQ ID NO: 18972 - DNA, 21 bp, Homo sapiens
attattaactrttagtcttcc

SEQ ID NO: 18973 - DNA, 21 bp, Homo sapiens
tatgaggtgcygacggggcgg

SEQ ID NO: 18974 - DNA, 21 bp, Homo sapiens
aggcttgagakgcccgaagta

SEQ ID NO: 18975 - DNA, 21 bp, Homo sapiens
taaatcacacygcctctctga

SEQ ID NO: 18976 - DNA, 21 bp, Homo sapiens
gtgcacacccmtgtagcttgc

SEQ ID NO: 18977 - DNA, 21 bp, Homo sapiens
ctgccactggyggagccttgc

SEQ ID NO: 18978 - DNA, 21 bp, Homo sapiens
atgacccctcmgagtacagca

SEQ ID NO: 18979 - DNA, 21 bp, Homo sapiens
gtgcctgagcygaccagaggc

SEQ ID NO: 18980 - DNA, 21 bp, Homo sapiens
tggataatgamttcccacagg

SEQ ID NO: 18981 - DNA, 21 bp, Homo sapiens
gtggaccataytgatcagaag

SEQ ID NO: 18982 - DNA, 21 bp, Homo sapiens
acagttcattyggtgtttaat

SEQ ID NO: 18983 - DNA, 21 bp, Homo sapiens
gaggagctggyctggcttcta

SEQ ID NO: 18984 - DNA, 21 bp, Homo sapiens
taacttccccrtgctgtggtg

SEQ ID NO: 18985 - DNA, 21 bp, Homo sapiens
agggaaatgarcacatcatgg

SEQ ID NO: 18986 - DNA, 21 bp, Homo sapiens
gggttggatcycttgggagtg

SEQ ID NO: 18987 - DNA, 21 bp, Homo sapiens
caaatctctaygtaaggttac

SEQ ID NO: 18988 - DNA, 21 bp, Homo sapiens
acaggctaccytctcaggcac

SEQ ID NO: 18989 - DNA, 21 bp, Homo sapiens
caacctgcacrtggaagttac

SEQ ID NO: 18990 - DNA, 21 bp, Homo sapiens
ctgaactagayggcctctaaa

SEQ ID NO: 18991 - DNA, 21 bp, Homo sapiens
gagttcagccrgaagcgagat

SEQ ID NO: 18992 - DNA, 21 bp, Homo sapiens
tcttacccgcrtgatgtcttc

SEQ ID NO: 18993 - DNA, 21 bp, Homo sapiens
tactggaaccygggatggagc

SEQ ID NO: 18994 - DNA, 21 bp, Homo sapiens
gtgctaggacragaatccacc

SEQ ID NO: 18995 - DNA, 21 bp, Homo sapiens
gttaaattctktaattaaaga

SEQ ID NO: 18996 - DNA, 21 bp, Homo sapiens
actgtgaagayggcaacccat

SEQ ID NO: 18997 - DNA, 21 bp, Homo sapiens
tgaactgattraaaaaagaaa

SEQ ID NO: 18998 - DNA, 21 bp, Homo sapiens
attcaattcarctgtagttgg

SEQ ID NO: 18999 - DNA, 21 bp, Homo sapiens
attatatccaytatgtcaaaa

SEQ ID NO: 19000 - DNA, 21 bp, Homo sapiens
ccgaaaccacrctcatctttc

SEQ ID NO: 19001 - DNA, 21 bp, Homo sapiens
tacctaacatrcttatcattt

SEQ ID NO: 19002 - DNA, 21 bp, Homo sapiens
acagtagtacrtgcttcaaga

SEQ ID NO: 19003 - DNA, 21 bp, Homo sapiens
tcaccactggycctgataaca

SEQ ID NO: 19004 - DNA, 21 bp, Homo sapiens
agataccaatrtctcagtgag

SEQ ID NO: 19005 - DNA, 21 bp, Homo sapiens
aaatgttcctrgaggtcttct

SEQ ID NO: 19006 - DNA, 21 bp, Homo sapiens
tttctcaacayggtttttaca

SEQ ID NO: 19007 - DNA, 21 bp, Homo sapiens
ccttcttaccrgaaccttgtg

SEQ ID NO: 19008 - DNA, 21 bp, Homo sapiens
cttgtttagtycttcattcag

SEQ ID NO: 19009 - DNA, 21 bp, Homo sapiens
gctctgtgaarcatgttcaca

SEQ ID NO: 19010 - DNA, 21 bp, Homo sapiens
tgagtagaacygggccagttg

SEQ ID NO: 19011 - DNA, 21 bp, Homo sapiens
gctcagtgacrtcaacaggat

SEQ ID NO: 19012 - DNA, 21 bp, Homo sapiens
tagggaacttrgggcccagtc

SEQ ID NO: 19013 - DNA, 21 bp, Homo sapiens
tgctcaataayaagaagctaa

SEQ ID NO: 19014 - DNA, 21 bp, Homo sapiens
gatggtggccraatgatcttc

SEQ ID NO: 19015 - DNA, 21 bp, Homo sapiens
acatggtaccygaaatgttta

SEQ ID NO: 19016 - DNA, 21 bp, Homo sapiens
aaggacagtgytttcactcga

SEQ ID NO: 19017 - DNA, 21 bp, Homo sapiens
aaattttctaygtccccatgc

SEQ ID NO: 19018 - DNA, 21 bp, Homo sapiens
tttcttccctrcccttgctta

SEQ ID NO: 19019 - DNA, 21 bp, Homo sapiens
ataacttaatyctggctctgt

SEQ ID NO: 19020 - DNA, 21 bp, Homo sapiens
tcgcaaacctyagataattat

SEQ ID NO: 19021 - DNA, 21 bp, Homo sapiens
ttccctctctmtgatttcctg

SEQ ID NO: 19022 - DNA, 21 bp, Homo sapiens
catggcccgtratttggaagg

SEQ ID NO: 19023 - DNA, 21 bp, Homo sapiens
aaccaatattycattttgtta

SEQ ID NO: 19024 - DNA, 21 bp, Homo sapiens
caagtgaggaygatttactca

SEQ ID NO: 19025 - DNA, 21 bp, Homo sapiens
gatgagggaarggaaagaact

SEQ ID NO: 19026 - DNA, 21 bp, Homo sapiens
agtcaatctargagggattgt

SEQ ID NO: 19027 - DNA, 21 bp, Homo sapiens
tctctcacatrattcttacta

SEQ ID NO: 19028 - DNA, 21 bp, Homo sapiens
tggacaaggcraatagagtca

SEQ ID NO: 19029 - DNA, 21 bp, Homo sapiens
tgtgcagattygttatatagg

SEQ ID NO: 19030 - DNA, 21 bp, Homo sapiens
gtcctcatgartgactgaatt

SEQ ID NO: 19031 - DNA, 21 bp, Homo sapiens
attttggatargatagtgtct

SEQ ID NO: 19032 - DNA, 21 bp, Homo sapiens
attcttgtttytaacaattaa

SEQ ID NO: 19033 - DNA, 21 bp, Homo sapiens
ttgaaataatytggtacccga

SEQ ID NO: 19034 - DNA, 21 bp, Homo sapiens
tggtacccgaygtatttcttt

SEQ ID NO: 19035 - DNA, 21 bp, Homo sapiens
gaatttccatrtaatttacaa

SEQ ID NO: 19036 - DNA, 21 bp, Homo sapiens
catcctctgcytttccaactc

SEQ ID NO: 19037 - DNA, 21 bp, Homo sapiens
actagcattamcaagtgagtt

SEQ ID NO: 19038 - DNA, 21 bp, Homo sapiens
gctctgctacrgctctatggt

SEQ ID NO: 19039 - DNA, 21 bp, Homo sapiens
acttcttccayaggtttccta

SEQ ID NO: 19040 - DNA, 21 bp, Homo sapiens
aagaaagacgytcccgccact

SEQ ID NO: 19041 - DNA, 21 bp, Homo sapiens
tgatagcaagygccaatgcct

SEQ ID NO: 19042 - DNA, 21 bp, Homo sapiens
gcacctaccaygcggtggtcc

SEQ ID NO: 19043 - DNA, 21 bp, Homo sapiens
cccctaagtgracccttgtgc

SEQ ID NO: 19044 - DNA, 21 bp, Homo sapiens
atgagaatagmgcatcccaat

SEQ ID NO: 19045 - DNA, 21 bp, Homo sapiens
caaggggccartttctataat

SEQ ID NO: 19046 - DNA, 21 bp, Homo sapiens
ggagcactgaraatggagcac

SEQ ID NO: 19047 - DNA, 21 bp, Homo sapiens
ctgacagccaygatgcctgga

SEQ ID NO: 19048 - DNA, 21 bp, Homo sapiens
ggattacttamgggtctgtgt

SEQ ID NO: 19049 - DNA, 21 bp, Homo sapiens
ccccatagtgygggagcctgg

SEQ ID NO: 19050 - DNA, 21 bp, Homo sapiens
tattgaccatygcctaggtgt

SEQ ID NO: 19051 - DNA, 21 bp, Homo sapiens
ctctgaacctygcctggagcc

SEQ ID NO: 19052 - DNA, 21 bp, Homo sapiens
tggcccaggcrtgccagtcac

SEQ ID NO: 19053 - DNA, 21 bp, Homo sapiens
tgctctgagaygtgtcccata

SEQ ID NO: 19054 - DNA, 21 bp, Homo sapiens
gtcctaaggtmccctaacagc

SEQ ID NO: 19055 - DNA, 21 bp, Homo sapiens
ccatcttgacygtgccaccct

SEQ ID NO: 19056 - DNA, 21 bp, Homo sapiens
ttaagaggcaracatttattg

SEQ ID NO: 19057 - DNA, 21 bp, Homo sapiens
tcaacctctgyccttcctgca

SEQ ID NO: 19058 - DNA, 21 bp, Homo sapiens
ttaaaagtaargttgaataag

SEQ ID NO: 19059 - DNA, 21 bp, Homo sapiens
ctggatattckaattaccttg

SEQ ID NO: 19060 - DNA, 21 bp, Homo sapiens
aagatgaagaygtacacagtt

SEQ ID NO: 19061 - DNA, 21 bp, Homo sapiens
tggcagtgtcyggtcagtctt

SEQ ID NO: 19062 - DNA, 21 bp, Homo sapiens
catagtcctckgaccactgta

SEQ ID NO: 19063 - DNA, 21 bp, Homo sapiens
agcatcttctrttttctaaat

SEQ ID NO: 19064 - DNA, 21 bp, Homo sapiens
tgattcggccrcggggaggtg

SEQ ID NO: 19065 - DNA, 21 bp, Homo sapiens
caagcataacytaaaacactg

SEQ ID NO: 19066 - DNA, 21 bp, Homo sapiens
ttttgctaggrttactggtca

SEQ ID NO: 19067 - DNA, 21 bp, Homo sapiens
cagcttagttkcctggttttc

SEQ ID NO: 19068 - DNA, 21 bp, Homo sapiens
ggagtacaccrttggagaaac

SEQ ID NO: 19069 - DNA, 21 bp, Homo sapiens
gccccatgccrcttttcctcc

SEQ ID NO: 19070 - DNA, 21 bp, Homo sapiens
ttataaaccayttctcctttg

SEQ ID NO: 19071 - DNA, 21 bp, Homo sapiens
ctttggtggtrcatttatcag

SEQ ID NO: 19072 - DNA, 21 bp, Homo sapiens
ccagctagtgycctagccagt

SEQ ID NO: 19073 - DNA, 21 bp, Homo sapiens
tgtccaaatcyttcccatcct

SEQ ID NO: 19074 - DNA, 21 bp, Homo sapiens
aggaggcggtycacctgctcc

SEQ ID NO: 19075 - DNA, 21 bp, Homo sapiens
tgtgagtagcrgtgctctgga

SEQ ID NO: 19076 - DNA, 21 bp, Homo sapiens
catacttttcytttatgattc

SEQ ID NO: 19077 - DNA, 21 bp, Homo sapiens
ggctgccccayggtgctagca

SEQ ID NO: 19078 - DNA, 21 bp, Homo sapiens
ggcttggaggkgcttgagcgt

SEQ ID NO: 19079 - DNA, 21 bp, Homo sapiens
caggcccattkttttttattg

SEQ ID NO: 19080 - DNA, 21 bp, Homo sapiens
aacaaataatraaaaagcttg

SEQ ID NO: 19081 - DNA, 21 bp, Homo sapiens
gagggggcaayctaataaggg

SEQ ID NO: 19082 - DNA, 21 bp, Homo sapiens
tggaaattttytaaatgacaa

SEQ ID NO: 19083 - DNA, 21 bp, Homo sapiens
tactttcaaamcccaaattaa

SEQ ID NO: 19084 - DNA, 21 bp, Homo sapiens
ttccactatcrattagttacg

SEQ ID NO: 19085 - DNA, 21 bp, Homo sapiens
tgcacccaccycccaaaaaaa

SEQ ID NO: 19086 - DNA, 21 bp, Homo sapiens
actgggattamccaatcaatt

SEQ ID NO: 19087 - DNA, 21 bp, Homo sapiens
gattcagttcraaagaggcaa

SEQ ID NO: 19088 - DNA, 21 bp, Homo sapiens
gtcaccactcrattcacttgc

SEQ ID NO: 19089 - DNA, 21 bp, Homo sapiens
ccctaatgacygctaataaga

SEQ ID NO: 19090 - DNA, 21 bp, Homo sapiens
tttctctgacrgttctcagaa

SEQ ID NO: 19091 - DNA, 21 bp, Homo sapiens
tgttctacttycacaatcctt

SEQ ID NO: 19092 - DNA, 21 bp, Homo sapiens
ccccaacatcrtgtgttaata

SEQ ID NO: 19093 - DNA, 21 bp, Homo sapiens
tcacctttaaytttgtcccag

SEQ ID NO: 19094 - DNA, 21 bp, Homo sapiens
gagtacttacyttaatgattg

SEQ ID NO: 19095 - DNA, 21 bp, Homo sapiens
actttttattrctggaataaa

SEQ ID NO: 19096 - DNA, 21 bp, Homo sapiens
gttaacgggcytaatttcaat

SEQ ID NO: 19097 - DNA, 21 bp, Homo sapiens
acctaattaarcttttaactt

SEQ ID NO: 19098 - DNA, 21 bp, Homo sapiens
cagtctagtcyccgttcagac

SEQ ID NO: 19099 - DNA, 21 bp, Homo sapiens
ctgattaactytgtagttaag

SEQ ID NO: 19100 - DNA, 21 bp, Homo sapiens
atccagcttcktcccccttgg

SEQ ID NO: 19101 - DNA, 21 bp, Homo sapiens
tatctattatrattatcccta

SEQ ID NO: 19102 - DNA, 21 bp, Homo sapiens
cataaagctgyccataactgt

SEQ ID NO: 19103 - DNA, 21 bp, Homo sapiens
ggattagatartttaattcat

SEQ ID NO: 19104 - DNA, 21 bp, Homo sapiens
tgtattcacaktagctagcag

SEQ ID NO: 19105 - DNA, 21 bp, Homo sapiens
taataggccartgctgaggcc

SEQ ID NO: 19106 - DNA, 21 bp, Homo sapiens
ctaagcgctayactctgttat

SEQ ID NO: 19107 - DNA, 21 bp, Homo sapiens
ctgtaatcatrttttcatctt

SEQ ID NO: 19108 - DNA, 21 bp, Homo sapiens
ctaaaaaggtkgacctgatgg

SEQ ID NO: 19109 - DNA, 21 bp, Homo sapiens
actgcagtccrttcgtttgcc

SEQ ID NO: 19110 - DNA, 21 bp, Homo sapiens
agctgatactrgcccaggact

SEQ ID NO: 19111 - DNA, 21 bp, Homo sapiens
tctctcctgtragtacagttt

SEQ ID NO: 19112 - DNA, 21 bp, Homo sapiens
ggctttgaacragttctctct

SEQ ID NO: 19113 - DNA, 21 bp, Homo sapiens
tttggaattcyggaagaatat

SEQ ID NO: 19114 - DNA, 21 bp, Homo sapiens
ttgaacagatygacactggca

SEQ ID NO: 19115 - DNA, 21 bp, Homo sapiens
atgagttttartgtcccaccc

SEQ ID NO: 19116 - DNA, 21 bp, Homo sapiens
tatcttttttraatgactgct

SEQ ID NO: 19117 - DNA, 21 bp, Homo sapiens
aatgcatgtgraagcgcaagg

SEQ ID NO: 19118 - DNA, 21 bp, Homo sapiens
caacttgtagyaggaggacac

SEQ ID NO: 19119 - DNA, 21 bp, Homo sapiens
gaaagacttgrccacagttta

SEQ ID NO: 19120 - DNA, 21 bp, Homo sapiens
actttgtaggkagggagagca

SEQ ID NO: 19121 - DNA, 21 bp, Homo sapiens
cattactctcygcttcactac

SEQ ID NO: 19122 - DNA, 21 bp, Homo sapiens
caatctttttrccttgggcta

SEQ ID NO: 19123 - DNA, 21 bp, Homo sapiens
ggctggtgagyggggaataga

SEQ ID NO: 19124 - DNA, 21 bp, Homo sapiens
tttttagctayagaggagagc

SEQ ID NO: 19125 - DNA, 21 bp, Homo sapiens
tcatgactttytttctctaac

SEQ ID NO: 19126 - DNA, 21 bp, Homo sapiens
caataaagcarttacactggg

SEQ ID NO: 19127 - DNA, 21 bp, Homo sapiens
ctgtttggagrtcctggtgtt

SEQ ID NO: 19128 - DNA, 21 bp, Homo sapiens
tgtttgtctartgttcatcat

SEQ ID NO: 19129 - DNA, 21 bp, Homo sapiens
tgacctcactrcccttaatca

SEQ ID NO: 19130 - DNA, 21 bp, Homo sapiens
taattacactktaatcccagt

SEQ ID NO: 19131 - DNA, 21 bp, Homo sapiens
aaaaagtacayaccataggtt

SEQ ID NO: 19132 - DNA, 21 bp, Homo sapiens
ctatcttgacmaaatgccaaa

SEQ ID NO: 19133 - DNA, 21 bp, Homo sapiens
tcctcttcttrtatttacttt

SEQ ID NO: 19134 - DNA, 21 bp, Homo sapiens
atttgagatcrggcacttgtg

SEQ ID NO: 19135 - DNA, 21 bp, Homo sapiens
tgttttgaggmtaaaaggtaa

SEQ ID NO: 19136 - DNA, 21 bp, Homo sapiens
cactgctggargcttatgcaa

SEQ ID NO: 19137 - DNA, 21 bp, Homo sapiens
tacttaaaaayaggtaaatgg

SEQ ID NO: 19138 - DNA, 21 bp, Homo sapiens
gagatgctaaraaaggtaaca

SEQ ID NO: 19139 - DNA, 21 bp, Homo sapiens
cccttttcaayacaagcgttt

SEQ ID NO: 19140 - DNA, 21 bp, Homo sapiens
cccgagtggcycacagctctt

SEQ ID NO: 19141 - DNA, 21 bp, Homo sapiens
atctcgttagktcccatgccc

SEQ ID NO: 19142 - DNA, 21 bp, Homo sapiens
ctggcccagaygctaactagc

SEQ ID NO: 19143 - DNA, 21 bp, Homo sapiens
cctgctccgamttcaggcctc

SEQ ID NO: 19144 - DNA, 21 bp, Homo sapiens
gagtagaaackgtttgtaggg

SEQ ID NO: 19145 - DNA, 21 bp, Homo sapiens
cctcaatcacrcttttcctgt

SEQ ID NO: 19146 - DNA, 21 bp, Homo sapiens
tcatagccacygtcttcctcc

SEQ ID NO: 19147 - DNA, 21 bp, Homo sapiens
ttgctaagctygccaaaacat

SEQ ID NO: 19148 - DNA, 21 bp, Homo sapiens
aagaacaaggrgtgatgcaaa

SEQ ID NO: 19149 - DNA, 21 bp, Homo sapiens
cctggtccacrgtatatatat

SEQ ID NO: 19150 - DNA, 21 bp, Homo sapiens
tcttgctcttrcaaaatctga

SEQ ID NO: 19151 - DNA, 21 bp, Homo sapiens
caggaactcaygcccctcaac

SEQ ID NO: 19152 - DNA, 21 bp, Homo sapiens
gcttaatttgrccattgcctt

SEQ ID NO: 19153 - DNA, 21 bp, Homo sapiens
gcaacgtgtgyaggctctagt

SEQ ID NO: 19154 - DNA, 21 bp, Homo sapiens
aaggcaagtcygtctgctgtg

SEQ ID NO: 19155 - DNA, 21 bp, Homo sapiens
agaaagaccaygggaaaatct

SEQ ID NO: 19156 - DNA, 21 bp, Homo sapiens
agttgtgcccyggtgacctga

SEQ ID NO: 19157 - DNA, 21 bp, Homo sapiens
agttgttatcygtgcagagat

SEQ ID NO: 19158 - DNA, 21 bp, Homo sapiens
ctcttcaggaygtgatgctag

SEQ ID NO: 19159 - DNA, 21 bp, Homo sapiens
ccaaacaaaaygccacttcag

SEQ ID NO: 19160 - DNA, 21 bp, Homo sapiens
aaaaaacaaarcaagactttt

SEQ ID NO: 19161 - DNA, 21 bp, Homo sapiens
aagccatccartatgcggtat

SEQ ID NO: 19162 - DNA, 21 bp, Homo sapiens
ctctggattcrttccttgcat

SEQ ID NO: 19163 - DNA, 21 bp, Homo sapiens
tagaaaatgayacaaatgccg

SEQ ID NO: 19164 - DNA, 21 bp, Homo sapiens
tgttgctcaamatcttgcttg

SEQ ID NO: 19165 - DNA, 21 bp, Homo sapiens
tattcgatgamctcattcttt

SEQ ID NO: 19166 - DNA, 21 bp, Homo sapiens
cattccaaacratgtattaaa

SEQ ID NO: 19167 - DNA, 21 bp, Homo sapiens
aaaaatcctcytgttggtagt

SEQ ID NO: 19168 - DNA, 21 bp, Homo sapiens
cctggaaaagyagtgtccaca

SEQ ID NO: 19169 - DNA, 21 bp, Homo sapiens
ggaagtagtgraggggaagct

SEQ ID NO: 19170 - DNA, 21 bp, Homo sapiens
tataccctacmcttgccttct

SEQ ID NO: 19171 - DNA, 21 bp, Homo sapiens
actattgcgtragtttcttct

SEQ ID NO: 19172 - DNA, 21 bp, Homo sapiens
ccctttatagmaaaagtttac

SEQ ID NO: 19173 - DNA, 21 bp, Homo sapiens
tttgtggaggmagcagtattt

SEQ ID NO: 19174 - DNA, 21 bp, Homo sapiens
tcaaatttccrtaattgtgta

SEQ ID NO: 19175 - DNA, 21 bp, Homo sapiens
ggagaccaccrcaccctgggg

SEQ ID NO: 19176 - DNA, 21 bp, Homo sapiens
actttgacatkttctatattg

SEQ ID NO: 19177 - DNA, 21 bp, Homo sapiens
ctctaagttayactctccatc

SEQ ID NO: 19178 - DNA, 21 bp, Homo sapiens
ggcaagtcaaratggccttct

SEQ ID NO: 19179 - DNA, 21 bp, Homo sapiens
gcttatatgayttcattttat

SEQ ID NO: 19180 - DNA, 21 bp, Homo sapiens
caattcccccmaaaaaatcta

SEQ ID NO: 19181 - DNA, 21 bp, Homo sapiens
acaatgtattkgcaattcaac

SEQ ID NO: 19182 - DNA, 21 bp, Homo sapiens
tttcatctttygtgtccatct

SEQ ID NO: 19183 - DNA, 21 bp, Homo sapiens
tagcagggtcktttttaaatt

SEQ ID NO: 19184 - DNA, 21 bp, Homo sapiens
tgtttaaaaayagtacaggaa

SEQ ID NO: 19185 - DNA, 21 bp, Homo sapiens
tagccttggcrtgaacattca

SEQ ID NO: 19186 - DNA, 21 bp, Homo sapiens
atgttgcttgktgacatctag

SEQ ID NO: 19187 - DNA, 21 bp, Homo sapiens
caacaggtagrgtacctgcca

SEQ ID NO: 19188 - DNA, 21 bp, Homo sapiens
tttcttccccyataaaatgag

SEQ ID NO: 19189 - DNA, 21 bp, Homo sapiens
ctgctccattrttctcattct

SEQ ID NO: 19190 - DNA, 21 bp, Homo sapiens
cctgaggcctyggctcaccct

SEQ ID NO: 19191 - DNA, 21 bp, Homo sapiens
tgctttatgartgcaagaggg

SEQ ID NO: 19192 - DNA, 21 bp, Homo sapiens
gccagggagamatttgttcag

SEQ ID NO: 19193 - DNA, 21 bp, Homo sapiens
ctctgattctycttgtccccg

SEQ ID NO: 19194 - DNA, 21 bp, Homo sapiens
tggatgctttrggaagatgcc

SEQ ID NO: 19195 - DNA, 21 bp, Homo sapiens
agcatttacaytgggaaggaa

SEQ ID NO: 19196 - DNA, 21 bp, Homo sapiens
ggatcacacaygctaatctca

SEQ ID NO: 19197 - DNA, 21 bp, Homo sapiens
tcatgtgcctrgtgtccacca

SEQ ID NO: 19198 - DNA, 21 bp, Homo sapiens
ctgtttaagayaggttctgtc

SEQ ID NO: 19199 - DNA, 21 bp, Homo sapiens
tctttaccaayttagaaacat

SEQ ID NO: 19200 - DNA, 21 bp, Homo sapiens
atggtttactygccgaataaa

SEQ ID NO: 19201 - DNA, 21 bp, Homo sapiens
tgctcagaggktgtcttagtt

SEQ ID NO: 19202 - DNA, 21 bp, Homo sapiens
tgcgtggtccrttgtgacagc

SEQ ID NO: 19203 - DNA, 21 bp, Homo sapiens
cctgaggctcyctttcctcat

SEQ ID NO: 19204 - DNA, 21 bp, Homo sapiens
agtcaataacraaatccacat

SEQ ID NO: 19205 - DNA, 21 bp, Homo sapiens
tacaaagttaytcctttgcaa

SEQ ID NO: 19206 - DNA, 21 bp, Homo sapiens
gtgtgacttckggccaaagga

SEQ ID NO: 19207 - DNA, 21 bp, Homo sapiens
aaattagctgraaaatgactt

SEQ ID NO: 19208 - DNA, 21 bp, Homo sapiens
tgttccctttrtgaccattca

SEQ ID NO: 19209 - DNA, 21 bp, Homo sapiens
gatggtaacgrtcattctgat

SEQ ID NO: 19210 - DNA, 21 bp, Homo sapiens
caatgaactcytaaagaacta

SEQ ID NO: 19211 - DNA, 21 bp, Homo sapiens
atttttactaygtgttactag

SEQ ID NO: 19212 - DNA, 21 bp, Homo sapiens
gtttctttgtrtaggaacacg

SEQ ID NO: 19213 - DNA, 21 bp, Homo sapiens
tttctgctgtrttttcttggg

SEQ ID NO: 19214 - DNA, 21 bp, Homo sapiens
gtgctctcttrcttctttaca

SEQ ID NO: 19215 - DNA, 21 bp, Homo sapiens
aaaccaccttkccctgagacc

SEQ ID NO: 19216 - DNA, 21 bp, Homo sapiens
atatctgtccygttttctcat

SEQ ID NO: 19217 - DNA, 21 bp, Homo sapiens
cgctttggaarggtcactgtg

SEQ ID NO: 19218 - DNA, 21 bp, Homo sapiens
cccgcatgctraagagcaagg

SEQ ID NO: 19219 - DNA, 21 bp, Homo sapiens
agccagatcaygttctgggta

SEQ ID NO: 19220 - DNA, 21 bp, Homo sapiens
tgtgtgcgtcragttatttaa

SEQ ID NO: 19221 - DNA, 21 bp, Homo sapiens
gccgtaaaaaygatgcccaga

SEQ ID NO: 19222 - DNA, 21 bp, Homo sapiens
gggagtgcccyaaccacagta

SEQ ID NO: 19223 - DNA, 21 bp, Homo sapiens
ggcaatgcccrgcataggctc

SEQ ID NO: 19224 - DNA, 21 bp, Homo sapiens
ggtagtattargaaccaagta

SEQ ID NO: 19225 - DNA, 21 bp, Homo sapiens
ggacttgatcmgtttggggca

SEQ ID NO: 19226 - DNA, 21 bp, Homo sapiens
tcctttgctaygatgaggaca

SEQ ID NO: 19227 - DNA, 21 bp, Homo sapiens
aggagaattcmgttctctgaa

SEQ ID NO: 19228 - DNA, 21 bp, Homo sapiens
ggcttagagamactctgagat

SEQ ID NO: 19229 - DNA, 21 bp, Homo sapiens
tcttgtctccmgagaaaaccc

SEQ ID NO: 19230 - DNA, 21 bp, Homo sapiens
cgaggcctggrgtgcaggcac

SEQ ID NO: 19231 - DNA, 21 bp, Homo sapiens
tgtctgcactyacgtcccaga

SEQ ID NO: 19232 - DNA, 21 bp, Homo sapiens
gccatcctggragccgggcag

SEQ ID NO: 19233 - DNA, 21 bp, Homo sapiens
tggtttttgaraatttgtgtt

SEQ ID NO: 19234 - DNA, 21 bp, Homo sapiens
ctatgatccaygtggacagat

SEQ ID NO: 19235 - DNA, 21 bp, Homo sapiens
ggagacaaaartaaagggggc

SEQ ID NO: 19236 - DNA, 21 bp, Homo sapiens
ttttacaggaygaaatgggct

SEQ ID NO: 19237 - DNA, 21 bp, Homo sapiens
atatttgatcrctgggcactt

SEQ ID NO: 19238 - DNA, 21 bp, Homo sapiens
ccggtcaacargctaagtcct

SEQ ID NO: 19239 - DNA, 21 bp, Homo sapiens
catccctgagmatttgttttc

SEQ ID NO: 19240 - DNA, 21 bp, Homo sapiens
agacccccggkgggtacgcaa

SEQ ID NO: 19241 - DNA, 21 bp, Homo sapiens
tgagcagcctygaggggtcac

SEQ ID NO: 19242 - DNA, 21 bp, Homo sapiens
gaactctgacraagccactga

SEQ ID NO: 19243 - DNA, 21 bp, Homo sapiens
gtaagattgckttaaaaaaaa

SEQ ID NO: 19244 - DNA, 21 bp, Homo sapiens
tgaacacagcrttgtggccag

SEQ ID NO: 19245 - DNA, 21 bp, Homo sapiens
tttactcctgrgaactttgca

SEQ ID NO: 19246 - DNA, 21 bp, Homo sapiens
agtctggaccrggctcacact

SEQ ID NO: 19247 - DNA, 21 bp, Homo sapiens
gaattcggggyaggacgctca

SEQ ID NO: 19248 - DNA, 21 bp, Homo sapiens
ggaaggccctrgctcaggtgg

SEQ ID NO: 19249 - DNA, 21 bp, Homo sapiens
gtgctctgagrcctggctgtc

SEQ ID NO: 19250 - DNA, 21 bp, Homo sapiens
tctgaggaacraaagccccgg

SEQ ID NO: 19251 - DNA, 21 bp, Homo sapiens
tgagcatgtcraggacgcccc

SEQ ID NO: 19252 - DNA, 21 bp, Homo sapiens
gatttagtatyatctgaagtt

SEQ ID NO: 19253 - DNA, 21 bp, Homo sapiens
atgggggtggrataatataaa

SEQ ID NO: 19254 - DNA, 21 bp, Homo sapiens
tccccagactyactgccccta

SEQ ID NO: 19255 - DNA, 21 bp, Homo sapiens
gtggctcagcmtgtccatcag

SEQ ID NO: 19256 - DNA, 21 bp, Homo sapiens
tgtctgacgaktccgacaaaa

SEQ ID NO: 19257 - DNA, 21 bp, Homo sapiens
actctcttcaratgatttcaa

SEQ ID NO: 19258 - DNA, 21 bp, Homo sapiens
ggggattgacrgaaaaataaa

SEQ ID NO: 19259 - DNA, 21 bp, Homo sapiens
taacacagccrtaaagctcta

SEQ ID NO: 19260 - DNA, 21 bp, Homo sapiens
ttacagtatcrtcatcagata

SEQ ID NO: 19261 - DNA, 21 bp, Homo sapiens
taacaaataaytttgaaaggg

SEQ ID NO: 19262 - DNA, 21 bp, Homo sapiens
ttgtaaatgtkaaggtgaata

SEQ ID NO: 19263 - DNA, 21 bp, Homo sapiens
ctgttgataaytggggcccaa

SEQ ID NO: 19264 - DNA, 21 bp, Homo sapiens
gcatcgggacrggaagcacca

SEQ ID NO: 19265 - DNA, 21 bp, Homo sapiens
caggtgaaggmtgaagctcag

SEQ ID NO: 19266 - DNA, 21 bp, Homo sapiens
gtcattcgccyggagtttttg

SEQ ID NO: 19267 - DNA, 21 bp, Homo sapiens
tccctttgacygaaaccaagt

SEQ ID NO: 19268 - DNA, 21 bp, Homo sapiens
cccctgtcacrgtcagtaaac

SEQ ID NO: 19269 - DNA, 21 bp, Homo sapiens
tgtaggtgtgrgcttactggg

SEQ ID NO: 19270 - DNA, 21 bp, Homo sapiens
cttcatctctygaagggctgc

SEQ ID NO: 19271 - DNA, 21 bp, Homo sapiens
tttcacaaccktcttattggt

SEQ ID NO: 19272 - DNA, 21 bp, Homo sapiens
gctggttctgrgacatgcttt

SEQ ID NO: 19273 - DNA, 21 bp, Homo sapiens
gtcaaagtcayagaactgggg

SEQ ID NO: 19274 - DNA, 21 bp, Homo sapiens
ctgccaagagyatgtgattgc

SEQ ID NO: 19275 - DNA, 21 bp, Homo sapiens
cattctaggcygctgagtacc

SEQ ID NO: 19276 - DNA, 21 bp, Homo sapiens
tgtggtggtaytgaagaagag

SEQ ID NO: 19277 - DNA, 21 bp, Homo sapiens
caagagctgtygggaatgccg

SEQ ID NO: 19278 - DNA, 21 bp, Homo sapiens
ctcttacttayattgtttcat

SEQ ID NO: 19279 - DNA, 21 bp, Homo sapiens
ataaagctatraaaggtttgt

SEQ ID NO: 19280 - DNA, 21 bp, Homo sapiens
cttaggctttytgtgtttggt

SEQ ID NO: 19281 - DNA, 21 bp, Homo sapiens
actatatattrttaatccctg

SEQ ID NO: 19282 - DNA, 21 bp, Homo sapiens
tagggggatcmgcagatacaa

SEQ ID NO: 19283 - DNA, 21 bp, Homo sapiens
attctgcaatrctatttctca

SEQ ID NO: 19284 - DNA, 21 bp, Homo sapiens
actgaattttraagtattttg

SEQ ID NO: 19285 - DNA, 21 bp, Homo sapiens
agtggcagagytgggtacaaa

SEQ ID NO: 19286 - DNA, 21 bp, Homo sapiens
tcatatctaaycactcctcct

SEQ ID NO: 19287 - DNA, 21 bp, Homo sapiens
agtttcatttkatatcatcta

SEQ ID NO: 19288 - DNA, 21 bp, Homo sapiens
ttaatgaatayagtaaaatgt

SEQ ID NO: 19289 - DNA, 21 bp, Homo sapiens
ggaatgctacrgaatttaagt

SEQ ID NO: 19290 - DNA, 21 bp, Homo sapiens
aggtggtgagygctttggatt

SEQ ID NO: 19291 - DNA, 21 bp, Homo sapiens
cttgatttgarttttcagctg

SEQ ID NO: 19292 - DNA, 21 bp, Homo sapiens
ctgtctcctgmcaatttcact

SEQ ID NO: 19293 - DNA, 21 bp, Homo sapiens
tcatctctgaytcacggctgc

SEQ ID NO: 19294 - DNA, 21 bp, Homo sapiens
aagtggtaatrctcgctgtct

SEQ ID NO: 19295 - DNA, 21 bp, Homo sapiens
agtgaggtgcygtaaagcttg

SEQ ID NO: 19296 - DNA, 21 bp, Homo sapiens
tgttaggaccracaggatcat

SEQ ID NO: 19297 - DNA, 21 bp, Homo sapiens
ttatcaatatytgctaatagt

SEQ ID NO: 19298 - DNA, 21 bp, Homo sapiens
ttaaccattaygtaattgact

SEQ ID NO: 19299 - DNA, 21 bp, Homo sapiens
attttgatggyaggcgcatta

SEQ ID NO: 19300 - DNA, 21 bp, Homo sapiens
tattgagctcytgaaatgtgg

SEQ ID NO: 19301 - DNA, 21 bp, Homo sapiens
cttcaatattrttattgccaa

SEQ ID NO: 19302 - DNA, 21 bp, Homo sapiens
tctggagaagrgtgtttcagg

SEQ ID NO: 19303 - DNA, 21 bp, Homo sapiens
attgtcaggcmtgggaaggtt

SEQ ID NO: 19304 - DNA, 21 bp, Homo sapiens
tctaagtgaarcaaatgtttg

SEQ ID NO: 19305 - DNA, 21 bp, Homo sapiens
atcaaactatrcatgttaata

SEQ ID NO: 19306 - DNA, 21 bp, Homo sapiens
aagaaggagaragctgttcca

SEQ ID NO: 19307 - DNA, 21 bp, Homo sapiens
cacatttgtaygcagagataa

SEQ ID NO: 19308 - DNA, 21 bp, Homo sapiens
agtaaggaatracatgcccta

SEQ ID NO: 19309 - DNA, 21 bp, Homo sapiens
tttcccatgamgatctgcata

SEQ ID NO: 19310 - DNA, 21 bp, Homo sapiens
tagcctgctaygatttatcat

SEQ ID NO: 19311 - DNA, 21 bp, Homo sapiens
atatttgtacrgctaactata

SEQ ID NO: 19312 - DNA, 21 bp, Homo sapiens
ctacatcaaartctacttatc

SEQ ID NO: 19313 - DNA, 21 bp, Homo sapiens
ataataaataycccccaattc

SEQ ID NO: 19314 - DNA, 21 bp, Homo sapiens
gaagcaggctkgtatgatgtg

SEQ ID NO: 19315 - DNA, 21 bp, Homo sapiens
cattaattaargccctgctgt

SEQ ID NO: 19316 - DNA, 21 bp, Homo sapiens
aattgatacarcctttcttga

SEQ ID NO: 19317 - DNA, 21 bp, Homo sapiens
tgttactgttrtcatcttcat

SEQ ID NO: 19318 - DNA, 21 bp, Homo sapiens
ttacacatttrtatctaagga

SEQ ID NO: 19319 - DNA, 21 bp, Homo sapiens
aattaggtgtygtcttcttct

SEQ ID NO: 19320 - DNA, 21 bp, Homo sapiens
atttcaggtgrgagcttcctt

SEQ ID NO: 19321 - DNA, 21 bp, Homo sapiens
atttctcaacmtcaccactat

SEQ ID NO: 19322 - DNA, 21 bp, Homo sapiens
tctgcaaaccyaccttctcat

SEQ ID NO: 19323 - DNA, 21 bp, Homo sapiens
catttccacaytgaggcattt

SEQ ID NO: 19324 - DNA, 21 bp, Homo sapiens
gaagccactgygagaaaggta

SEQ ID NO: 19325 - DNA, 21 bp, Homo sapiens
catagcaactrctgtaacatt

SEQ ID NO: 19326 - DNA, 21 bp, Homo sapiens
ttagaccaggkcctgtgatca

SEQ ID NO: 19327 - DNA, 21 bp, Homo sapiens
aaccctgttayttattctcaa

SEQ ID NO: 19328 - DNA, 21 bp, Homo sapiens
ggatatattgyttacttatct

SEQ ID NO: 19329 - DNA, 21 bp, Homo sapiens
ttctccaactycacccaagga

SEQ ID NO: 19330 - DNA, 21 bp, Homo sapiens
ggacttgcagrtatgtagaca

SEQ ID NO: 19331 - DNA, 21 bp, Homo sapiens
acttattcccytcccataaca

SEQ ID NO: 19332 - DNA, 21 bp, Homo sapiens
aattagccatrttacatctaa

SEQ ID NO: 19333 - DNA, 21 bp, Homo sapiens
ttttcagaaayacttttaagt

SEQ ID NO: 19334 - DNA, 21 bp, Homo sapiens
tgaacttgggyactttgcttc

SEQ ID NO: 19335 - DNA, 21 bp, Homo sapiens
tccacatggaycattgtatgc

SEQ ID NO: 19336 - DNA, 21 bp, Homo sapiens
atctctatcaytttctattta

SEQ ID NO: 19337 - DNA, 21 bp, Homo sapiens
tatttggtttmaggtcagagc

SEQ ID NO: 19338 - DNA, 21 bp, Homo sapiens
ttttgtaagartatatttcaa

SEQ ID NO: 19339 - DNA, 21 bp, Homo sapiens
aaggaggttaycttgatcatt

SEQ ID NO: 19340 - DNA, 21 bp, Homo sapiens
ttctaatcacratttaaacca

SEQ ID NO: 19341 - DNA, 21 bp, Homo sapiens
agtatatgaargatcttgaat

SEQ ID NO: 19342 - DNA, 21 bp, Homo sapiens
ttcctctgcayttctggccca

SEQ ID NO: 19343 - DNA, 21 bp, Homo sapiens
tgcttaagtamcttctactta

SEQ ID NO: 19344 - DNA, 21 bp, Homo sapiens
gctgctaattmaaataaataa

SEQ ID NO: 19345 - DNA, 21 bp, Homo sapiens
tacagaaaatktgagaggaga

SEQ ID NO: 19346 - DNA, 21 bp, Homo sapiens
ttgattatccyctatatccct

SEQ ID NO: 19347 - DNA, 21 bp, Homo sapiens
tgtagccaccrtgtctaaggg

SEQ ID NO: 19348 - DNA, 21 bp, Homo sapiens
acaagaggacyagtcttgtcc

SEQ ID NO: 19349 - DNA, 21 bp, Homo sapiens
cttcattaacygttaaaattt

SEQ ID NO: 19350 - DNA, 21 bp, Homo sapiens
ttaccattaaygctgatctta

SEQ ID NO: 19351 - DNA, 21 bp, Homo sapiens
ccagaaacaartacctcagaa

SEQ ID NO: 19352 - DNA, 21 bp, Homo sapiens
gggcacccagrttccctcatc

SEQ ID NO: 19353 - DNA, 21 bp, Homo sapiens
ttttctgattratgaataagt

SEQ ID NO: 19354 - DNA, 21 bp, Homo sapiens
cttaattatgrtgttttccat

SEQ ID NO: 19355 - DNA, 21 bp, Homo sapiens
aattttggatktacaagagtt

SEQ ID NO: 19356 - DNA, 21 bp, Homo sapiens
cttttgtgttrtacaattcta

SEQ ID NO: 19357 - DNA, 21 bp, Homo sapiens
ccaatgttcamatactaaaaa

SEQ ID NO: 19358 - DNA, 21 bp, Homo sapiens
tcctcaatcayctcttcctgg

SEQ ID NO: 19359 - DNA, 21 bp, Homo sapiens
tagactaaacytcagctaaat

SEQ ID NO: 19360 - DNA, 21 bp, Homo sapiens
catggttttcytaatggatag

SEQ ID NO: 19361 - DNA, 21 bp, Homo sapiens
acccttgaagrtcaatgcatc

SEQ ID NO: 19362 - DNA, 21 bp, Homo sapiens
tataatccaarctattgctag

SEQ ID NO: 19363 - DNA, 21 bp, Homo sapiens
cttataattcygagtcataaa

SEQ ID NO: 19364 - DNA, 21 bp, Homo sapiens
tctattttttraaactcatgc

SEQ ID NO: 19365 - DNA, 21 bp, Homo sapiens
gctcagcattygaaaatgttc

SEQ ID NO: 19366 - DNA, 21 bp, Homo sapiens
caacttttctyatttcatttc

SEQ ID NO: 19367 - DNA, 21 bp, Homo sapiens
aatgaagccaraacacaaaag

SEQ ID NO: 19368 - DNA, 21 bp, Homo sapiens
acaaaaggtaygtgtggctta

SEQ ID NO: 19369 - DNA, 21 bp, Homo sapiens
ttaagtgccamtcaaagctcc

SEQ ID NO: 19370 - DNA, 21 bp, Homo sapiens
aaagcaccccyacaggctttt

SEQ ID NO: 19371 - DNA, 21 bp, Homo sapiens
agtctgatgartgtgatattc

SEQ ID NO: 19372 - DNA, 21 bp, Homo sapiens
aaaaccagtcyacatgtctga

SEQ ID NO: 19373 - DNA, 21 bp, Homo sapiens
atcaaggagaycagaaaccaa

SEQ ID NO: 19374 - DNA, 21 bp, Homo sapiens
atagaccccayggaatcatta

SEQ ID NO: 19375 - DNA, 21 bp, Homo sapiens
tctagcaactktcatgaacaa

SEQ ID NO: 19376 - DNA, 21 bp, Homo sapiens
tgattctcaaycaggggcaat

SEQ ID NO: 19377 - DNA, 21 bp, Homo sapiens
ctggtattatkcaatgcctct

SEQ ID NO: 19378 - DNA, 21 bp, Homo sapiens
agcactgctaytgttgggctc

SEQ ID NO: 19379 - DNA, 21 bp, Homo sapiens
tattatcatgrcctatgagtg

SEQ ID NO: 19380 - DNA, 21 bp, Homo sapiens
tatagtagtcrttggaaggct

SEQ ID NO: 19381 - DNA, 21 bp, Homo sapiens
acacctaacaygataattagt

SEQ ID NO: 19382 - DNA, 21 bp, Homo sapiens
tgaaaggcagmtttggaggta

SEQ ID NO: 19383 - DNA, 21 bp, Homo sapiens
aatagttctcrgttgctcttc

SEQ ID NO: 19384 - DNA, 21 bp, Homo sapiens
agtcttcttgyggggaggcag

SEQ ID NO: 19385 - DNA, 21 bp, Homo sapiens
gtaggatttcragtcagaaga

SEQ ID NO: 19386 - DNA, 21 bp, Homo sapiens
tcaacagtgaktaaagacagc

SEQ ID NO: 19387 - DNA, 21 bp, Homo sapiens
ccttaaaagaycaatccagga

SEQ ID NO: 19388 - DNA, 21 bp, Homo sapiens
agtctgaataygagaaaagag

SEQ ID NO: 19389 - DNA, 21 bp, Homo sapiens
tcttctatcaygtgttcgaaa

SEQ ID NO: 19390 - DNA, 21 bp, Homo sapiens
acactaccacrtactaactgt

SEQ ID NO: 19391 - DNA, 21 bp, Homo sapiens
cagagctctgrtcgctcagtt

SEQ ID NO: 19392 - DNA, 21 bp, Homo sapiens
tctgtactccmtttaaaatcc

SEQ ID NO: 19393 - DNA, 21 bp, Homo sapiens
agagttctgarttggtgcaaa

SEQ ID NO: 19394 - DNA, 21 bp, Homo sapiens
ctgcagaagayggtggatagc

SEQ ID NO: 19395 - DNA, 21 bp, Homo sapiens
agtgggatacyctgaattgtt

SEQ ID NO: 19396 - DNA, 21 bp, Homo sapiens
attttacgtgyatggtactgg

SEQ ID NO: 19397 - DNA, 21 bp, Homo sapiens
catatgtactrctaagcagac

SEQ ID NO: 19398 - DNA, 21 bp, Homo sapiens
tttgtgcatgyggttcaaagg

SEQ ID NO: 19399 - DNA, 21 bp, Homo sapiens
attggacttayagaaagcaaa

SEQ ID NO: 19400 - DNA, 21 bp, Homo sapiens
agtgttacagrcttagatgaa

SEQ ID NO: 19401 - DNA, 21 bp, Homo sapiens
catggtgattrgtaacatagt

SEQ ID NO: 19402 - DNA, 21 bp, Homo sapiens
ctaaaccccaygagaggtgtt

SEQ ID NO: 19403 - DNA, 21 bp, Homo sapiens
ggtggcaaacytggtatttga

SEQ ID NO: 19404 - DNA, 21 bp, Homo sapiens
aaattttaaaygagtcactga

SEQ ID NO: 19405 - DNA, 21 bp, Homo sapiens
ataaaagtgtraaaagaaaag

SEQ ID NO: 19406 - DNA, 21 bp, Homo sapiens
gtattagagamcaaagaaggt

SEQ ID NO: 19407 - DNA, 21 bp, Homo sapiens
gtgccaggccyctggctgcat

SEQ ID NO: 19408 - DNA, 21 bp, Homo sapiens
ggcctcttccrtgtccagaat

SEQ ID NO: 19409 - DNA, 21 bp, Homo sapiens
aattaacttayggtgtagtga

SEQ ID NO: 19410 - DNA, 21 bp, Homo sapiens
tttaaatggtyagatctcttc

SEQ ID NO: 19411 - DNA, 21 bp, Homo sapiens
ttgaccccaargtaagtcaca

SEQ ID NO: 19412 - DNA, 21 bp, Homo sapiens
ggagggctcartcctgctttc

SEQ ID NO: 19413 - DNA, 21 bp, Homo sapiens
ggtgatgttgygttttttctt

SEQ ID NO: 19414 - DNA, 21 bp, Homo sapiens
catgcatagcracccagataa

SEQ ID NO: 19415 - DNA, 21 bp, Homo sapiens
cagcatcttayggaaactgaa

SEQ ID NO: 19416 - DNA, 21 bp, Homo sapiens
ggaacataackcagccatgct

SEQ ID NO: 19417 - DNA, 21 bp, Homo sapiens
cttttgtgcartaaagtagtt

SEQ ID NO: 19418 - DNA, 21 bp, Homo sapiens
cactttagggrtctggaagcg

SEQ ID NO: 19419 - DNA, 21 bp, Homo sapiens
tggcataaacygcttgacttc

SEQ ID NO: 19420 - DNA, 21 bp, Homo sapiens
tcatcaacagytaagcacctg

SEQ ID NO: 19421 - DNA, 21 bp, Homo sapiens
agaagatctaygtccttgaaa

SEQ ID NO: 19422 - DNA, 21 bp, Homo sapiens
cctgcaccccygaaaccatca

SEQ ID NO: 19423 - DNA, 21 bp, Homo sapiens
acaggaagatrtagcccctgg

SEQ ID NO: 19424 - DNA, 21 bp, Homo sapiens
ggactgaaaaygcgttagtga

SEQ ID NO: 19425 - DNA, 21 bp, Homo sapiens
ttccaggcagkcacatcagat

SEQ ID NO: 19426 - DNA, 21 bp, Homo sapiens
tgtgcatgacrtagaagagtg

SEQ ID NO: 19427 - DNA, 21 bp, Homo sapiens
aggagctcttrtgtcctcctt

SEQ ID NO: 19428 - DNA, 21 bp, Homo sapiens
atgcaagaggrtttgtgctaa

SEQ ID NO: 19429 - DNA, 21 bp, Homo sapiens
gtgcctggagytgaagtttgg

SEQ ID NO: 19430 - DNA, 21 bp, Homo sapiens
gatctcaacargacacttgtt

SEQ ID NO: 19431 - DNA, 21 bp, Homo sapiens
gttgatttctrtattttgctg

SEQ ID NO: 19432 - DNA, 21 bp, Homo sapiens
atcagcatggygaaaggcccc

SEQ ID NO: 19433 - DNA, 21 bp, Homo sapiens
aattgtgtccrgaaggaaaat

SEQ ID NO: 19434 - DNA, 21 bp, Homo sapiens
aacagaaagtrgtaaaaggaa

SEQ ID NO: 19435 - DNA, 21 bp, Homo sapiens
atggtagtgayggctaacatt

SEQ ID NO: 19436 - DNA, 21 bp, Homo sapiens
acaacaggaamcttctaagac

SEQ ID NO: 19437 - DNA, 21 bp, Homo sapiens
ctaatgctgcrcctcccattc

SEQ ID NO: 19438 - DNA, 21 bp, Homo sapiens
tcctgtagcamcacacctctg

SEQ ID NO: 19439 - DNA, 21 bp, Homo sapiens
gctctgtttcrgttctcttgg

SEQ ID NO: 19440 - DNA, 21 bp, Homo sapiens
ggaacaaccgrcttttagtgt

SEQ ID NO: 19441 - DNA, 21 bp, Homo sapiens
aagagaaatgrtcatggccat

SEQ ID NO: 19442 - DNA, 21 bp, Homo sapiens
tcacccctgtrttagttatct

SEQ ID NO: 19443 - DNA, 21 bp, Homo sapiens
cctcgggattycctgcacagc

SEQ ID NO: 19444 - DNA, 21 bp, Homo sapiens
acacttggctracgatgtcct

SEQ ID NO: 19445 - DNA, 21 bp, Homo sapiens
ctcctgggcaygtttgtctgt

SEQ ID NO: 19446 - DNA, 21 bp, Homo sapiens
agaaagatccrttaattatat

SEQ ID NO: 19447 - DNA, 21 bp, Homo sapiens
aggaaatgtgygtgtgatcct

SEQ ID NO: 19448 - DNA, 21 bp, Homo sapiens
gttctattggrcttcacaggt

SEQ ID NO: 19449 - DNA, 21 bp, Homo sapiens
attttgtcccyagttacagtc

SEQ ID NO: 19450 - DNA, 21 bp, Homo sapiens
ttgtctatacrtagcatttgt

SEQ ID NO: 19451 - DNA, 21 bp, Homo sapiens
ctgctgggaayagcagatggt

SEQ ID NO: 19452 - DNA, 21 bp, Homo sapiens
tggaccagagrccttttcagg

SEQ ID NO: 19453 - DNA, 21 bp, Homo sapiens
gaaaactccaygttgatgatg

SEQ ID NO: 19454 - DNA, 21 bp, Homo sapiens
tgatcaccaaygaatggcatt

SEQ ID NO: 19455 - DNA, 21 bp, Homo sapiens
ctgtcagggtygctttggaca

SEQ ID NO: 19456 - DNA, 21 bp, Homo sapiens
gaacttcgagygcagatcaat

SEQ ID NO: 19457 - DNA, 21 bp, Homo sapiens
tccccagaagrgggcacacct

SEQ ID NO: 19458 - DNA, 21 bp, Homo sapiens
tcactcgttcycacaaatcat

SEQ ID NO: 19459 - DNA, 21 bp, Homo sapiens
ggattcagtgmcacacccagt

SEQ ID NO: 19460 - DNA, 21 bp, Homo sapiens
atttctttcaytgttaacttc

SEQ ID NO: 19461 - DNA, 21 bp, Homo sapiens
aggaaggattrgtgatcaaat

SEQ ID NO: 19462 - DNA, 21 bp, Homo sapiens
atataactagyagatgcagag

SEQ ID NO: 19463 - DNA, 21 bp, Homo sapiens
tttatgttcartcatgagaga

SEQ ID NO: 19464 - DNA, 21 bp, Homo sapiens
ttggtgcatcrttagtgctca

SEQ ID NO: 19465 - DNA, 21 bp, Homo sapiens
actgtgacttygggtaggtag

SEQ ID NO: 19466 - DNA, 21 bp, Homo sapiens
ggggtcactcragcactcagc

SEQ ID NO: 19467 - DNA, 21 bp, Homo sapiens
ccttaggtctyccattcccag

SEQ ID NO: 19468 - DNA, 21 bp, Homo sapiens
ctgactccctrtgatcctgat

SEQ ID NO: 19469 - DNA, 21 bp, Homo sapiens
acagggccagrcaccaaggca

SEQ ID NO: 19470 - DNA, 21 bp, Homo sapiens
tggggctgggrtacaggataa

SEQ ID NO: 19471 - DNA, 21 bp, Homo sapiens
gctgtaacccrctccatctcc

SEQ ID NO: 19472 - DNA, 21 bp, Homo sapiens
ctcccatcatkggtacagtga

SEQ ID NO: 19473 - DNA, 21 bp, Homo sapiens
actcactaagyatacatcaaa

SEQ ID NO: 19474 - DNA, 21 bp, Homo sapiens
agccggggcgyggcaccctcg

SEQ ID NO: 19475 - DNA, 21 bp, Homo sapiens
aaaggagggargaggaagtga

SEQ ID NO: 19476 - DNA, 21 bp, Homo sapiens
ggcacaaggayttagtcatct

SEQ ID NO: 19477 - DNA, 21 bp, Homo sapiens
actatactccycttaaggagt

SEQ ID NO: 19478 - DNA, 21 bp, Homo sapiens
atctggcccaratgactcagt

SEQ ID NO: 19479 - DNA, 21 bp, Homo sapiens
gaaaattcttyacacttcact

SEQ ID NO: 19480 - DNA, 21 bp, Homo sapiens
tcaacagggtytgccatgtgc

SEQ ID NO: 19481 - DNA, 21 bp, Homo sapiens
cattcttcccrggtgcagctc

SEQ ID NO: 19482 - DNA, 21 bp, Homo sapiens
attcattaagrcacagaaatg

SEQ ID NO: 19483 - DNA, 21 bp, Homo sapiens
ataaaacgatkaaagattctt

SEQ ID NO: 19484 - DNA, 21 bp, Homo sapiens
ccatcctatgygctcctaggg

SEQ ID NO: 19485 - DNA, 21 bp, Homo sapiens
gtcacacaacrggttatacac

SEQ ID NO: 19486 - DNA, 21 bp, Homo sapiens
aagcactgctrtgaaagctac

SEQ ID NO: 19487 - DNA, 21 bp, Homo sapiens
gacccatttcycagcgggtaa

SEQ ID NO: 19488 - DNA, 21 bp, Homo sapiens
ggacttaattrcttaatttta

SEQ ID NO: 19489 - DNA, 21 bp, Homo sapiens
gaatggataaygtctgtgcca

SEQ ID NO: 19490 - DNA, 21 bp, Homo sapiens
taagcctaaaragactcatat

SEQ ID NO: 19491 - DNA, 21 bp, Homo sapiens
tttatatgctrgcattccgtt

SEQ ID NO: 19492 - DNA, 21 bp, Homo sapiens
ggtcctcaacrttctcagtgt

SEQ ID NO: 19493 - DNA, 21 bp, Homo sapiens
agtctagttckcaaccactgg

SEQ ID NO: 19494 - DNA, 21 bp, Homo sapiens
ccaggtacackgtgagaatgt

SEQ ID NO: 19495 - DNA, 21 bp, Homo sapiens
cgacacaggcygggactgaga

SEQ ID NO: 19496 - DNA, 21 bp, Homo sapiens
aaaccctatcygaagattgac

SEQ ID NO: 19497 - DNA, 21 bp, Homo sapiens
taagccttgcratgttctgcg

SEQ ID NO: 19498 - DNA, 21 bp, Homo sapiens
cattgctcctraagtatatat

SEQ ID NO: 19499 - DNA, 21 bp, Homo sapiens
acagatggacrgaagaaggca

SEQ ID NO: 19500 - DNA, 21 bp, Homo sapiens
ttgagaccaaygaatgcatta

SEQ ID NO: 19501 - DNA, 21 bp, Homo sapiens
tgccagtgtcyatgcttgcac

SEQ ID NO: 19502 - DNA, 21 bp, Homo sapiens
acttaattagkctgaaacccc

SEQ ID NO: 19503 - DNA, 21 bp, Homo sapiens
ttaatagttayggcaggcttc

SEQ ID NO: 19504 - DNA, 21 bp, Homo sapiens
taagttcaatyccttataatc

SEQ ID NO: 19505 - DNA, 21 bp, Homo sapiens
acaacaatgartctatagtta

SEQ ID NO: 19506 - DNA, 21 bp, Homo sapiens
ccatcaaagcmtgaatatcag

SEQ ID NO: 19507 - DNA, 21 bp, Homo sapiens
caatggcaaayacttagtcct

SEQ ID NO: 19508 - DNA, 21 bp, Homo sapiens
tggaaataaamcttattccaa

SEQ ID NO: 19509 - DNA, 21 bp, Homo sapiens
gcagagatcaytataactatt

SEQ ID NO: 19510 - DNA, 21 bp, Homo sapiens
atgtaaaacargaatggagag

SEQ ID NO: 19511 - DNA, 21 bp, Homo sapiens
agcattcataktcataagagg

SEQ ID NO: 19512 - DNA, 21 bp, Homo sapiens
cagttttacarcttcacagca

SEQ ID NO: 19513 - DNA, 21 bp, Homo sapiens
aatgtgaattkaataatgtta

SEQ ID NO: 19514 - DNA, 21 bp, Homo sapiens
ggtagagggtrtggggaaagg

SEQ ID NO: 19515 - DNA, 21 bp, Homo sapiens
ttttatatacrtggttgaaaa

SEQ ID NO: 19516 - DNA, 21 bp, Homo sapiens
gcagatgaatrattataaact

SEQ ID NO: 19517 - DNA, 21 bp, Homo sapiens
ttatctccttraatgttccct

SEQ ID NO: 19518 - DNA, 21 bp, Homo sapiens
ggtagcaaaaraataaatcac

SEQ ID NO: 19519 - DNA, 21 bp, Homo sapiens
gtaattaagcrtatagttatt

SEQ ID NO: 19520 - DNA, 21 bp, Homo sapiens
attctaaacakgtacgtgatt

SEQ ID NO: 19521 - DNA, 21 bp, Homo sapiens
agtatcagtcrgtgcagagct

SEQ ID NO: 19522 - DNA, 21 bp, Homo sapiens
tgaattgctgytggtcacagt

SEQ ID NO: 19523 - DNA, 21 bp, Homo sapiens
cctgcaacttytctataccta

SEQ ID NO: 19524 - DNA, 21 bp, Homo sapiens
cctggacaggrcataggccag

SEQ ID NO: 19525 - DNA, 21 bp, Homo sapiens
cacagcatgaycatgagaaaa

SEQ ID NO: 19526 - DNA, 21 bp, Homo sapiens
tgagtaagaayagttatttcc

SEQ ID NO: 19527 - DNA, 21 bp, Homo sapiens
ccgtgcagggytgaggccgtt

SEQ ID NO: 19528 - DNA, 21 bp, Homo sapiens
caatgtaccaygccaacatac

SEQ ID NO: 19529 - DNA, 21 bp, Homo sapiens
tagaaaatctmtcccagaaat

SEQ ID NO: 19530 - DNA, 21 bp, Homo sapiens
gtgagggtaayacacttcact

SEQ ID NO: 19531 - DNA, 21 bp, Homo sapiens
gaaactttcarttgttttact

SEQ ID NO: 19532 - DNA, 21 bp, Homo sapiens
gcagcctgccycatgggataa

SEQ ID NO: 19533 - DNA, 21 bp, Homo sapiens
agataaatttragtgataata

SEQ ID NO: 19534 - DNA, 21 bp, Homo sapiens
tagtagaaacytgctcttcct

SEQ ID NO: 19535 - DNA, 21 bp, Homo sapiens
cacttcatgamacttggctgc

SEQ ID NO: 19536 - DNA, 21 bp, Homo sapiens
atcttcatcayaatctcttaa

SEQ ID NO: 19537 - DNA, 21 bp, Homo sapiens
gagaatccccycggttaattc

SEQ ID NO: 19538 - DNA, 21 bp, Homo sapiens
ctctcaaatgrtacgctgaaa

SEQ ID NO: 19539 - DNA, 21 bp, Homo sapiens
ggtgggagccrtgagtcctcc

SEQ ID NO: 19540 - DNA, 21 bp, Homo sapiens
atggggagctycaaaggccat

SEQ ID NO: 19541 - DNA, 21 bp, Homo sapiens
tatttggataygggcatgcaa

SEQ ID NO: 19542 - DNA, 21 bp, Homo sapiens
cagtctgaggyattgtgtact

SEQ ID NO: 19543 - DNA, 21 bp, Homo sapiens
cacaattgttycatccaactc

SEQ ID NO: 19544 - DNA, 21 bp, Homo sapiens
agtgattcatrcacagaagcg

SEQ ID NO: 19545 - DNA, 21 bp, Homo sapiens
aacattttatmaatgattcac

SEQ ID NO: 19546 - DNA, 21 bp, Homo sapiens
agaagtcaagytgatgagtcc

SEQ ID NO: 19547 - DNA, 21 bp, Homo sapiens
tcagccagatrtttacccctt

SEQ ID NO: 19548 - DNA, 21 bp, Homo sapiens
aaagggctgcrgcccatcaaa

SEQ ID NO: 19549 - DNA, 21 bp, Homo sapiens
gggcagggaaycatctgacat

SEQ ID NO: 19550 - DNA, 21 bp, Homo sapiens
gagtacacctkggctctcact

SEQ ID NO: 19551 - DNA, 21 bp, Homo sapiens
tctagcccagrggacctgagc

SEQ ID NO: 19552 - DNA, 21 bp, Homo sapiens
gcaactccccmacttcaattc

SEQ ID NO: 19553 - DNA, 21 bp, Homo sapiens
gctgtcacgaygcttggttgg

SEQ ID NO: 19554 - DNA, 21 bp, Homo sapiens
aacattgcttmaatgcccagc

SEQ ID NO: 19555 - DNA, 21 bp, Homo sapiens
ctcagggaggrgttttaacaa

SEQ ID NO: 19556 - DNA, 21 bp, Homo sapiens
tgaatgagatratgaatgtat

SEQ ID NO: 19557 - DNA, 21 bp, Homo sapiens
tgggatttcaycagaattgaa

SEQ ID NO: 19558 - DNA, 21 bp, Homo sapiens
ttatcacaagrtgcaaaaagc

SEQ ID NO: 19559 - DNA, 21 bp, Homo sapiens
ccagtagatgrgtctcctagg

SEQ ID NO: 19560 - DNA, 21 bp, Homo sapiens
ggaatagcgtyggccagctaa

SEQ ID NO: 19561 - DNA, 21 bp, Homo sapiens
ttcaggcctcmatttctttgc

SEQ ID NO: 19562 - DNA, 21 bp, Homo sapiens
ctgttactacyactgttagct

SEQ ID NO: 19563 - DNA, 21 bp, Homo sapiens
atttttaagayaatcaattta

SEQ ID NO: 19564 - DNA, 21 bp, Homo sapiens
ttgagctgtgrgaatctcaaa

SEQ ID NO: 19565 - DNA, 21 bp, Homo sapiens
gctcctcagargacctggact

SEQ ID NO: 19566 - DNA, 21 bp, Homo sapiens
agctcggaccytccaggcctg

SEQ ID NO: 19567 - DNA, 21 bp, Homo sapiens
ccaggcacaarcctcagttgc

SEQ ID NO: 19568 - DNA, 21 bp, Homo sapiens
ccattatagcygaatattctt

SEQ ID NO: 19569 - DNA, 21 bp, Homo sapiens
agtgaccaaakctggaagcct

SEQ ID NO: 19570 - DNA, 21 bp, Homo sapiens
gccaactggakcctcaggttc

SEQ ID NO: 19571 - DNA, 21 bp, Homo sapiens
aaagatgaaamctgtgtgtcc

SEQ ID NO: 19572 - DNA, 21 bp, Homo sapiens
tcaaccagacrgcacatgcta

SEQ ID NO: 19573 - DNA, 21 bp, Homo sapiens
aacatagcacrccacggggta

SEQ ID NO: 19574 - DNA, 21 bp, Homo sapiens
tggggcttatyagcatttact

SEQ ID NO: 19575 - DNA, 21 bp, Homo sapiens
gatcaaagctrttagtaacaa

SEQ ID NO: 19576 - DNA, 21 bp, Homo sapiens
acgctttatcktgatgacaga

SEQ ID NO: 19577 - DNA, 21 bp, Homo sapiens
tctctgtgacrtggcagacat

SEQ ID NO: 19578 - DNA, 21 bp, Homo sapiens
tccctcaatgygaagatcccc

SEQ ID NO: 19579 - DNA, 21 bp, Homo sapiens
tgattcactcyccaacagcat

SEQ ID NO: 19580 - DNA, 21 bp, Homo sapiens
cattctttgcratgtttggag

SEQ ID NO: 19581 - DNA, 21 bp, Homo sapiens
tcaaaccaacrtcaaaatgcc

SEQ ID NO: 19582 - DNA, 21 bp, Homo sapiens
tcaccatgaaygtaatgaatc

SEQ ID NO: 19583 - DNA, 21 bp, Homo sapiens
ccaattcataytgcccactgt

SEQ ID NO: 19584 - DNA, 21 bp, Homo sapiens
gtgtgagaccrtgcagcaaac

SEQ ID NO: 19585 - DNA, 21 bp, Homo sapiens
tcttgtaagaytttagtggat

SEQ ID NO: 19586 - DNA, 21 bp, Homo sapiens
tttggacatcrgtactcaact

SEQ ID NO: 19587 - DNA, 21 bp, Homo sapiens
ggagtggttayatttttgagt

SEQ ID NO: 19588 - DNA, 21 bp, Homo sapiens
caaagggcatygaagacggtc

SEQ ID NO: 19589 - DNA, 21 bp, Homo sapiens
gtctgcgcagkcaggttggtt

SEQ ID NO: 19590 - DNA, 21 bp, Homo sapiens
tgtggtgggcrtgttcttcac

SEQ ID NO: 19591 - DNA, 21 bp, Homo sapiens
ctaatgttatmatcgtatctc

SEQ ID NO: 19592 - DNA, 21 bp, Homo sapiens
ctccttcagtkagttagaagc

SEQ ID NO: 19593 - DNA, 21 bp, Homo sapiens
tgcctttggcyaactaggcac

SEQ ID NO: 19594 - DNA, 21 bp, Homo sapiens
tctttttgcckagtaaatagg

SEQ ID NO: 19595 - DNA, 21 bp, Homo sapiens
ttccaaaacayaagcaataaa

SEQ ID NO: 19596 - DNA, 21 bp, Homo sapiens
tgatgattcaytcagtcctgg

SEQ ID NO: 19597 - DNA, 21 bp, Homo sapiens
gagtgtatctyttgaattggc

SEQ ID NO: 19598 - DNA, 21 bp, Homo sapiens
agcagagagayaagactgtgt

SEQ ID NO: 19599 - DNA, 21 bp, Homo sapiens
ctggtataatrtgacacagct

SEQ ID NO: 19600 - DNA, 21 bp, Homo sapiens
caccttaggayggctaaggct

SEQ ID NO: 19601 - DNA, 21 bp, Homo sapiens
taagatccccyagtcctatcc

SEQ ID NO: 19602 - DNA, 21 bp, Homo sapiens
cctttctatcyctgttaatag

SEQ ID NO: 19603 - DNA, 21 bp, Homo sapiens
tttatttgacrgtcctttgga

SEQ ID NO: 19604 - DNA, 21 bp, Homo sapiens
catattgtctrcttttctcca

SEQ ID NO: 19605 - DNA, 21 bp, Homo sapiens
aagaatcatamatttggtaaa

SEQ ID NO: 19606 - DNA, 21 bp, Homo sapiens
ggagtgggtgrgaaggtagta

SEQ ID NO: 19607 - DNA, 21 bp, Homo sapiens
tttaaacaaayaaacaaaaat

SEQ ID NO: 19608 - DNA, 21 bp, Homo sapiens
tcttaatactrtctcattgga

SEQ ID NO: 19609 - DNA, 21 bp, Homo sapiens
tggcaaaacayagtatataga

SEQ ID NO: 19610 - DNA, 21 bp, Homo sapiens
cagaagaagaygatggagaaa

SEQ ID NO: 19611 - DNA, 21 bp, Homo sapiens
tctgtcttcayagaatctcga

SEQ ID NO: 19612 - DNA, 21 bp, Homo sapiens
ctttctgaackagcaacccca

SEQ ID NO: 19613 - DNA, 21 bp, Homo sapiens
ctgtcatttakattacccttt

SEQ ID NO: 19614 - DNA, 21 bp, Homo sapiens
ggatgtagacraacaccaatg

SEQ ID NO: 19615 - DNA, 21 bp, Homo sapiens
agtagcacagmcccaagctac

SEQ ID NO: 19616 - DNA, 21 bp, Homo sapiens
gtccagagatkatcacagtga

SEQ ID NO: 19617 - DNA, 21 bp, Homo sapiens
caagataaatygcaatgacgt

SEQ ID NO: 19618 - DNA, 21 bp, Homo sapiens
ctgtgaatctkcttcacaatt

SEQ ID NO: 19619 - DNA, 21 bp, Homo sapiens
gactacctacygctggatggg

SEQ ID NO: 19620 - DNA, 21 bp, Homo sapiens
caaaatagaakggctggtgaa

SEQ ID NO: 19621 - DNA, 21 bp, Homo sapiens
ataaatctccrgataaataca

SEQ ID NO: 19622 - DNA, 21 bp, Homo sapiens
taagtaagaaygcaagggcaa

SEQ ID NO: 19623 - DNA, 21 bp, Homo sapiens
ggatgttctaygtaagcaata

SEQ ID NO: 19624 - DNA, 21 bp, Homo sapiens
gacagagtctyactctattgc

SEQ ID NO: 19625 - DNA, 21 bp, Homo sapiens
ggtgagtatayacacacacac

SEQ ID NO: 19626 - DNA, 21 bp, Homo sapiens
gaaagctacayaggaaataat

SEQ ID NO: 19627 - DNA, 21 bp, Homo sapiens
tttgaacctgyactttccaca

SEQ ID NO: 19628 - DNA, 21 bp, Homo sapiens
aagatgcccaragatgtagga

SEQ ID NO: 19629 - DNA, 21 bp, Homo sapiens
caaggtctaayggcctatgtt

SEQ ID NO: 19630 - DNA, 21 bp, Homo sapiens
atctcccggcyacgtctctca

SEQ ID NO: 19631 - DNA, 21 bp, Homo sapiens
cttgtccaggktcacatttct

SEQ ID NO: 19632 - DNA, 21 bp, Homo sapiens
aaactgtgtcygacatgtagt

SEQ ID NO: 19633 - DNA, 21 bp, Homo sapiens
ataataaggcygaattgagtg

SEQ ID NO: 19634 - DNA, 21 bp, Homo sapiens
tgaagtacgayttatagcata

SEQ ID NO: 19635 - DNA, 21 bp, Homo sapiens
cagtcttctcytggcgcctgt

SEQ ID NO: 19636 - DNA, 21 bp, Homo sapiens
agagatccagygaaggaaaga

SEQ ID NO: 19637 - DNA, 21 bp, Homo sapiens
aaacctgactytgccacttca

SEQ ID NO: 19638 - DNA, 21 bp, Homo sapiens
tcgaggttacyggtactttgt

SEQ ID NO: 19639 - DNA, 21 bp, Homo sapiens
ggggcctgacygaactgcagc

SEQ ID NO: 19640 - DNA, 21 bp, Homo sapiens
gagggtaagayagaaacactg

SEQ ID NO: 19641 - DNA, 21 bp, Homo sapiens
aaataccatcrtatagtattg

SEQ ID NO: 19642 - DNA, 21 bp, Homo sapiens
tcatggtccamatggatgtgc

SEQ ID NO: 19643 - DNA, 21 bp, Homo sapiens
gaaagctgatkagcgatctgg

SEQ ID NO: 19644 - DNA, 21 bp, Homo sapiens
aaatgataaaygtttgaggtg

SEQ ID NO: 19645 - DNA, 21 bp, Homo sapiens
aattttgttaycttgctccta

SEQ ID NO: 19646 - DNA, 21 bp, Homo sapiens
tcaggtgatcycgtgcctgag

SEQ ID NO: 19647 - DNA, 21 bp, Homo sapiens
catctctctakttgttttaaa

SEQ ID NO: 19648 - DNA, 21 bp, Homo sapiens
cctgcatctcmtgtcagcggg

SEQ ID NO: 19649 - DNA, 21 bp, Homo sapiens
atgttcttatrtataacccag

SEQ ID NO: 19650 - DNA, 21 bp, Homo sapiens
ttcagccattkggagctcttt

SEQ ID NO: 19651 - DNA, 21 bp, Homo sapiens
atttttgtatyaatgttcgca

SEQ ID NO: 19652 - DNA, 21 bp, Homo sapiens
actcatatgtyggacagctta

SEQ ID NO: 19653 - DNA, 21 bp, Homo sapiens
ttccgggcccrttcccccagc

SEQ ID NO: 19654 - DNA, 21 bp, Homo sapiens
tgcttggggtyagtgtgggca

SEQ ID NO: 19655 - DNA, 21 bp, Homo sapiens
tttacttattytggttttctt

SEQ ID NO: 19656 - DNA, 21 bp, Homo sapiens
ccacaccagaygtggctgata

SEQ ID NO: 19657 - DNA, 21 bp, Homo sapiens
agagaagtctragaatgaaaa

SEQ ID NO: 19658 - DNA, 21 bp, Homo sapiens
ttcgtccactrcctgagacag

SEQ ID NO: 19659 - DNA, 21 bp, Homo sapiens
agtgacaaagygcttttgcag

SEQ ID NO: 19660 - DNA, 21 bp, Homo sapiens
atttcagagtkatttcagatg

SEQ ID NO: 19661 - DNA, 21 bp, Homo sapiens
catcttcaagrtgcttgagga

SEQ ID NO: 19662 - DNA, 21 bp, Homo sapiens
ctattttttgycattacttcc

SEQ ID NO: 19663 - DNA, 21 bp, Homo sapiens
ttgaggctctmgtgtgatggt

SEQ ID NO: 19664 - DNA, 21 bp, Homo sapiens
ggccgtgcttrgagtccaccc

SEQ ID NO: 19665 - DNA, 21 bp, Homo sapiens
ggaaacttgamtttcagaaaa

SEQ ID NO: 19666 - DNA, 21 bp, Homo sapiens
gccagagaggygtggggtaaa

SEQ ID NO: 19667 - DNA, 21 bp, Homo sapiens
ctatccctctyctctaaaatc

SEQ ID NO: 19668 - DNA, 21 bp, Homo sapiens
tgagaatggaytaccctccct

SEQ ID NO: 19669 - DNA, 21 bp, Homo sapiens
ccgcctactgmacagcatccc

SEQ ID NO: 19670 - DNA, 21 bp, Homo sapiens
agcaaaatcaygatgtataag

SEQ ID NO: 19671 - DNA, 21 bp, Homo sapiens
gtcttcctgcrgttctcatag

SEQ ID NO: 19672 - DNA, 21 bp, Homo sapiens
cagaacgcccrtgctcagaaa

SEQ ID NO: 19673 - DNA, 21 bp, Homo sapiens
ccgccacgttytccaagtaac

SEQ ID NO: 19674 - DNA, 21 bp, Homo sapiens
tgtttttttartacaaacaac

SEQ ID NO: 19675 - DNA, 21 bp, Homo sapiens
agcaacccctrggtagccagg

SEQ ID NO: 19676 - DNA, 21 bp, Homo sapiens
gcctgcaagtkgtttacttac

SEQ ID NO: 19677 - DNA, 21 bp, Homo sapiens
ctgagttcctkatgctttgtt

SEQ ID NO: 19678 - DNA, 21 bp, Homo sapiens
ctatttgcctyttaaaacatc

SEQ ID NO: 19679 - DNA, 21 bp, Homo sapiens
gggatcccagycctctgctcc

SEQ ID NO: 19680 - DNA, 21 bp, Homo sapiens
tcagggaccckttccaggcaa

SEQ ID NO: 19681 - DNA, 21 bp, Homo sapiens
gtagggaaaakattggaaaca

SEQ ID NO: 19682 - DNA, 21 bp, Homo sapiens
acatcacctayatgaggcttg

SEQ ID NO: 19683 - DNA, 21 bp, Homo sapiens
gcatttgtggrtgtcttttca

SEQ ID NO: 19684 - DNA, 21 bp, Homo sapiens
aaaaacctggkcttgaattcc

SEQ ID NO: 19685 - DNA, 21 bp, Homo sapiens
acgccaggacyaagggtggca

SEQ ID NO: 19686 - DNA, 21 bp, Homo sapiens
cagcacggcckcctggtatat

SEQ ID NO: 19687 - DNA, 21 bp, Homo sapiens
ccatacaattyaatttggctt

SEQ ID NO: 19688 - DNA, 21 bp, Homo sapiens
aaacctatcaraatggctaaa

SEQ ID NO: 19689 - DNA, 21 bp, Homo sapiens
aaccatgtgamcttgggtgag

SEQ ID NO: 19690 - DNA, 21 bp, Homo sapiens
gggaaccctcyaagggacctc

SEQ ID NO: 19691 - DNA, 21 bp, Homo sapiens
tccttccctckggctgccaca

SEQ ID NO: 19692 - DNA, 21 bp, Homo sapiens
agggcaccatmgagctgggtg

SEQ ID NO: 19693 - DNA, 21 bp, Homo sapiens
atctgcagttygggcggtggg

SEQ ID NO: 19694 - DNA, 21 bp, Homo sapiens
gatccctgggrgagaagaggc

SEQ ID NO: 19695 - DNA, 21 bp, Homo sapiens
gttccgtctcrtcttaattta

SEQ ID NO: 19696 - DNA, 21 bp, Homo sapiens
agctagtccckgaattaagga

SEQ ID NO: 19697 - DNA, 21 bp, Homo sapiens
caggagtggayagaagccaaa

SEQ ID NO: 19698 - DNA, 21 bp, Homo sapiens
catcatctgcrgcatcacgtc

SEQ ID NO: 19699 - DNA, 21 bp, Homo sapiens
gctctggcacyactagggtcc

SEQ ID NO: 19700 - DNA, 21 bp, Homo sapiens
agccccaggayagaggtgaag

SEQ ID NO: 19701 - DNA, 21 bp, Homo sapiens
atcctttgctkatacagctgt

SEQ ID NO: 19702 - DNA, 21 bp, Homo sapiens
ctatggtatcytctctcttta

SEQ ID NO: 19703 - DNA, 21 bp, Homo sapiens
gcaggtgtgcygagaaggaac

SEQ ID NO: 19704 - DNA, 21 bp, Homo sapiens
cagaggtctcyagcaggctgg

SEQ ID NO: 19705 - DNA, 21 bp, Homo sapiens
gctgactcccytcccagtgag

SEQ ID NO: 19706 - DNA, 21 bp, Homo sapiens
aacatttcatrtagtgatatg

SEQ ID NO: 19707 - DNA, 21 bp, Homo sapiens
tgacttctcartgatacacaa

SEQ ID NO: 19708 - DNA, 21 bp, Homo sapiens
acacaactttktgtctataga

SEQ ID NO: 19709 - DNA, 21 bp, Homo sapiens
gtctttgaatytgagtctcag

SEQ ID NO: 19710 - DNA, 21 bp, Homo sapiens
tgccttccacraaaccagtcc

SEQ ID NO: 19711 - DNA, 21 bp, Homo sapiens
tgagcactcaytggcaaaagg

SEQ ID NO: 19712 - DNA, 21 bp, Homo sapiens
cctaatttgargaacttactt

SEQ ID NO: 19713 - DNA, 21 bp, Homo sapiens
ttcctcaacargccaaattca

SEQ ID NO: 19714 - DNA, 21 bp, Homo sapiens
taatacctccrtttagtttca

SEQ ID NO: 19715 - DNA, 21 bp, Homo sapiens
gtttttgtctkgaaatctctt

SEQ ID NO: 19716 - DNA, 21 bp, Homo sapiens
ctatgcatacrtatgtctcct

SEQ ID NO: 19717 - DNA, 21 bp, Homo sapiens
tgattctatargacattcatg

SEQ ID NO: 19718 - DNA, 21 bp, Homo sapiens
ctgttatttcrtaaaaagggt

SEQ ID NO: 19719 - DNA, 21 bp, Homo sapiens
gcctttggtgytgttgggacc

SEQ ID NO: 19720 - DNA, 21 bp, Homo sapiens
tacaggaaacrgaactagaaa

SEQ ID NO: 19721 - DNA, 21 bp, Homo sapiens
cattgctgttygcatttctct

SEQ ID NO: 19722 - DNA, 21 bp, Homo sapiens
cgggtaccccragcctaaagt

SEQ ID NO: 19723 - DNA, 21 bp, Homo sapiens
tcatctcgctkcaatgaagct

SEQ ID NO: 19724 - DNA, 21 bp, Homo sapiens
aaggttaaagrctactggtct

SEQ ID NO: 19725 - DNA, 21 bp, Homo sapiens
aaaagggctgraaaaaaatac

SEQ ID NO: 19726 - DNA, 21 bp, Homo sapiens
atatttttatktcttgccaaa

SEQ ID NO: 19727 - DNA, 21 bp, Homo sapiens
gaaagaccaakatgacaagag

SEQ ID NO: 19728 - DNA, 21 bp, Homo sapiens
tcgaaaccccrttgtcttcag

SEQ ID NO: 19729 - DNA, 21 bp, Homo sapiens
tctacacagcycctcactttc

SEQ ID NO: 19730 - DNA, 21 bp, Homo sapiens
cctccttcctraaccctgaga

SEQ ID NO: 19731 - DNA, 21 bp, Homo sapiens
ataaatccccrtaagtcaact

SEQ ID NO: 19732 - DNA, 21 bp, Homo sapiens
aaaaattagcyctataagtgt

SEQ ID NO: 19733 - DNA, 21 bp, Homo sapiens
gaacacacttkggagttctga

SEQ ID NO: 19734 - DNA, 21 bp, Homo sapiens
tgccatactcraggcctatgt

SEQ ID NO: 19735 - DNA, 21 bp, Homo sapiens
gataaagaaartattggacta

SEQ ID NO: 19736 - DNA, 21 bp, Homo sapiens
tgcatgatgayttatttaggt

SEQ ID NO: 19737 - DNA, 21 bp, Homo sapiens
tccaaaatgtkgtgtgtttat

SEQ ID NO: 19738 - DNA, 21 bp, Homo sapiens
agaataatgamggtgttctaa

SEQ ID NO: 19739 - DNA, 21 bp, Homo sapiens
ctggctagttrtgtgtcttgg

SEQ ID NO: 19740 - DNA, 21 bp, Homo sapiens
gctcatttttyagccctgcca

SEQ ID NO: 19741 - DNA, 21 bp, Homo sapiens
ctctgaatcgragctaccata

SEQ ID NO: 19742 - DNA, 21 bp, Homo sapiens
actgacttgartacttctgag

SEQ ID NO: 19743 - DNA, 21 bp, Homo sapiens
gttgatcctcraatgcttaca

SEQ ID NO: 19744 - DNA, 21 bp, Homo sapiens
tacagcattcmgtttctagcc

SEQ ID NO: 19745 - DNA, 21 bp, Homo sapiens
caaagaatggrttcactatga

SEQ ID NO: 19746 - DNA, 21 bp, Homo sapiens
tatatattccrtgcaatagag

SEQ ID NO: 19747 - DNA, 21 bp, Homo sapiens
cactttgcacrcgtctccatg

SEQ ID NO: 19748 - DNA, 21 bp, Homo sapiens
cacaagaagcmtgaagaaaac

SEQ ID NO: 19749 - DNA, 21 bp, Homo sapiens
tagacatatcyaggtttccta

SEQ ID NO: 19750 - DNA, 21 bp, Homo sapiens
tcaataacaarcatcagaacc

SEQ ID NO: 19751 - DNA, 21 bp, Homo sapiens
cctcgcctgarcactctatcc

SEQ ID NO: 19752 - DNA, 21 bp, Homo sapiens
tctaaaaaatygtttaggaac

SEQ ID NO: 19753 - DNA, 21 bp, Homo sapiens
catttccacakctagatgttt

SEQ ID NO: 19754 - DNA, 21 bp, Homo sapiens
actctatgatyccaaatgact

SEQ ID NO: 19755 - DNA, 21 bp, Homo sapiens
cacttcgtatkatccagcttt

SEQ ID NO: 19756 - DNA, 21 bp, Homo sapiens
catttaaaatkggagagtttg

SEQ ID NO: 19757 - DNA, 21 bp, Homo sapiens
gacatagtgcyttctgtggcc

SEQ ID NO: 19758 - DNA, 21 bp, Homo sapiens
taaaggattamgatggaatga

SEQ ID NO: 19759 - DNA, 21 bp, Homo sapiens
gggtttgggcrtactgagtac

SEQ ID NO: 19760 - DNA, 21 bp, Homo sapiens
cctctgttctrgggctggagg

SEQ ID NO: 19761 - DNA, 21 bp, Homo sapiens
agatttctcaygtacatccaa

SEQ ID NO: 19762 - DNA, 21 bp, Homo sapiens
ttgctactaayggttccttct

SEQ ID NO: 19763 - DNA, 21 bp, Homo sapiens
ctctgaaatgraaatcattta

SEQ ID NO: 19764 - DNA, 21 bp, Homo sapiens
ttctgaggtamatcatgtgaa

SEQ ID NO: 19765 - DNA, 21 bp, Homo sapiens
tctttcttgartaacatcctt

SEQ ID NO: 19766 - DNA, 21 bp, Homo sapiens
tatttctttayacgctgtctt

SEQ ID NO: 19767 - DNA, 21 bp, Homo sapiens
atttaaattcyatcctgggaa

SEQ ID NO: 19768 - DNA, 21 bp, Homo sapiens
agggacagccratgtgcaaac

SEQ ID NO: 19769 - DNA, 21 bp, Homo sapiens
gctcatgatcytaccttaaca

SEQ ID NO: 19770 - DNA, 21 bp, Homo sapiens
tcctatctgcrtgcttcctcc

SEQ ID NO: 19771 - DNA, 21 bp, Homo sapiens
tctcttaaacrttccctgata

SEQ ID NO: 19772 - DNA, 21 bp, Homo sapiens
tcagacctacrggaatctgag

SEQ ID NO: 19773 - DNA, 21 bp, Homo sapiens
aaaacaaaacrttctgccttt

SEQ ID NO: 19774 - DNA, 21 bp, Homo sapiens
atttctctctmcatattttct

SEQ ID NO: 19775 - DNA, 21 bp, Homo sapiens
taattgggaamaataaaacca

SEQ ID NO: 19776 - DNA, 21 bp, Homo sapiens
agcatttttcytgatagagaa

SEQ ID NO: 19777 - DNA, 21 bp, Homo sapiens
taaattctgcyaccatcactg

SEQ ID NO: 19778 - DNA, 21 bp, Homo sapiens
ggctgttaacrtacactgggg

SEQ ID NO: 19779 - DNA, 21 bp, Homo sapiens
ttcctattctrtagcacacaa

SEQ ID NO: 19780 - DNA, 21 bp, Homo sapiens
acaatgatatytgttaaaatt

SEQ ID NO: 19781 - DNA, 21 bp, Homo sapiens
agaagtgaggyagccagcttt

SEQ ID NO: 19782 - DNA, 21 bp, Homo sapiens
agacagcccaytgaaaatcat

SEQ ID NO: 19783 - DNA, 21 bp, Homo sapiens
ctaacttactktaattttaag

SEQ ID NO: 19784 - DNA, 21 bp, Homo sapiens
cagcttttgcyaagattctgc

SEQ ID NO: 19785 - DNA, 21 bp, Homo sapiens
caccattgacrtaagccatca

SEQ ID NO: 19786 - DNA, 21 bp, Homo sapiens
cttttactatygtatatttac

SEQ ID NO: 19787 - DNA, 21 bp, Homo sapiens
ttcccaaatcktcccacccct

SEQ ID NO: 19788 - DNA, 21 bp, Homo sapiens
agaattagggraaaaaaaatc

SEQ ID NO: 19789 - DNA, 21 bp, Homo sapiens
atctcgttatrtcataaggct

SEQ ID NO: 19790 - DNA, 21 bp, Homo sapiens
tctctaggctrtagttatgga

SEQ ID NO: 19791 - DNA, 21 bp, Homo sapiens
cccacatacartggtgagaca

SEQ ID NO: 19792 - DNA, 21 bp, Homo sapiens
ttgtgacatgkagatattttc

SEQ ID NO: 19793 - DNA, 21 bp, Homo sapiens
tattttactcrgttgtcagcc

SEQ ID NO: 19794 - DNA, 21 bp, Homo sapiens
cagagtgttaycttgctttga

SEQ ID NO: 19795 - DNA, 21 bp, Homo sapiens
agaaagctatraaggaagctg

SEQ ID NO: 19796 - DNA, 21 bp, Homo sapiens
agaaaggcaarttaaatgctt

SEQ ID NO: 19797 - DNA, 21 bp, Homo sapiens
tataattcgarctttttaaaa

SEQ ID NO: 19798 - DNA, 21 bp, Homo sapiens
cgttcattcaygttgttgcaa

SEQ ID NO: 19799 - DNA, 21 bp, Homo sapiens
ttcttttggcyaggctgtacc

SEQ ID NO: 19800 - DNA, 21 bp, Homo sapiens
tagagtctccytgaactgtag

SEQ ID NO: 19801 - DNA, 21 bp, Homo sapiens
tatggggactrttactccaat

SEQ ID NO: 19802 - DNA, 21 bp, Homo sapiens
aatatgtggayatttagagaa

SEQ ID NO: 19803 - DNA, 21 bp, Homo sapiens
agaaagtcttrtgttaaatct

SEQ ID NO: 19804 - DNA, 21 bp, Homo sapiens
tcattcagatrttgatatatg

SEQ ID NO: 19805 - DNA, 21 bp, Homo sapiens
tcttgagcaamaaaaatatta

SEQ ID NO: 19806 - DNA, 21 bp, Homo sapiens
agatgcatcaragaaagtgag

SEQ ID NO: 19807 - DNA, 21 bp, Homo sapiens
agttgttaaayatgatctagg

SEQ ID NO: 19808 - DNA, 21 bp, Homo sapiens
aggtaaagatkgtctgtagct

SEQ ID NO: 19809 - DNA, 21 bp, Homo sapiens
gttttccacaraaacaaaaac

SEQ ID NO: 19810 - DNA, 21 bp, Homo sapiens
cgcttcagaamtctgtgttgc

SEQ ID NO: 19811 - DNA, 21 bp, Homo sapiens
cacgagtaggraaaaaaaaac

SEQ ID NO: 19812 - DNA, 21 bp, Homo sapiens
aaatgccttgratgaaataag

SEQ ID NO: 19813 - DNA, 21 bp, Homo sapiens
acctcgcagtyctcagagttc

SEQ ID NO: 19814 - DNA, 21 bp, Homo sapiens
gtgaacttttyaaccacagag

SEQ ID NO: 19815 - DNA, 21 bp, Homo sapiens
ggggcaggtargaaattgctg

SEQ ID NO: 19816 - DNA, 21 bp, Homo sapiens
cgtgtcaaatkcttggaagca

SEQ ID NO: 19817 - DNA, 21 bp, Homo sapiens
cttatgagctrgaggcaaaag

SEQ ID NO: 19818 - DNA, 21 bp, Homo sapiens
aattattggtrttgttcttct

SEQ ID NO: 19819 - DNA, 21 bp, Homo sapiens
gcttctaatckagaaacaaag

SEQ ID NO: 19820 - DNA, 21 bp, Homo sapiens
taggggaacayggcctaagaa

SEQ ID NO: 19821 - DNA, 21 bp, Homo sapiens
tgcagattttrctgtctatga

SEQ ID NO: 19822 - DNA, 21 bp, Homo sapiens
aggcagctgtytttggaatgg

SEQ ID NO: 19823 - DNA, 21 bp, Homo sapiens
gggtctgtcayatatggcttt

SEQ ID NO: 19824 - DNA, 21 bp, Homo sapiens
taaattgttcracattgccca

SEQ ID NO: 19825 - DNA, 21 bp, Homo sapiens
tttacatgacytcaaggcaaa

SEQ ID NO: 19826 - DNA, 21 bp, Homo sapiens
atgttcccagmggttcaaggt

SEQ ID NO: 19827 - DNA, 21 bp, Homo sapiens
tctttatctayatccttcttg

SEQ ID NO: 19828 - DNA, 21 bp, Homo sapiens
gctgttcagcmaaaatgataa

SEQ ID NO: 19829 - DNA, 21 bp, Homo sapiens
tggatgccagytcatttaata

SEQ ID NO: 19830 - DNA, 21 bp, Homo sapiens
gaggcatatgyaccagccaaa

SEQ ID NO: 19831 - DNA, 21 bp, Homo sapiens
ctgctatttarttttatggac

SEQ ID NO: 19832 - DNA, 21 bp, Homo sapiens
attaatagcamgatctatcat

SEQ ID NO: 19833 - DNA, 21 bp, Homo sapiens
taggcactctkgttgtatggt

SEQ ID NO: 19834 - DNA, 21 bp, Homo sapiens
agttacaagayatttaatagg

SEQ ID NO: 19835 - DNA, 21 bp, Homo sapiens
aggattggatygtcttttctc

SEQ ID NO: 19836 - DNA, 21 bp, Homo sapiens
cattcactgayacccgggcac

SEQ ID NO: 19837 - DNA, 21 bp, Homo sapiens
tagactgtgakgaacccagtg

SEQ ID NO: 19838 - DNA, 21 bp, Homo sapiens
cagtggcctcytctgtaatat

SEQ ID NO: 19839 - DNA, 21 bp, Homo sapiens
tcctgtgagayattttgacaa

SEQ ID NO: 19840 - DNA, 21 bp, Homo sapiens
ccactgggaarcaaaacataa

SEQ ID NO: 19841 - DNA, 21 bp, Homo sapiens
tattcagtagrtgtgaaaatt

SEQ ID NO: 19842 - DNA, 21 bp, Homo sapiens
actagacctckgtgtatctca

SEQ ID NO: 19843 - DNA, 21 bp, Homo sapiens
caaacattgcyctagatgtgc

SEQ ID NO: 19844 - DNA, 21 bp, Homo sapiens
cattggctggytcattccttt

SEQ ID NO: 19845 - DNA, 21 bp, Homo sapiens
tgctaatttgyatagagagtt

SEQ ID NO: 19846 - DNA, 21 bp, Homo sapiens
atttcatctaytttcctttgt

SEQ ID NO: 19847 - DNA, 21 bp, Homo sapiens
gccaagatctktgtcttatcc

SEQ ID NO: 19848 - DNA, 21 bp, Homo sapiens
aacactaaatmtgtgcctttg

SEQ ID NO: 19849 - DNA, 21 bp, Homo sapiens
gtaacagattragtgttatca

SEQ ID NO: 19850 - DNA, 21 bp, Homo sapiens
ccacgatgagratgctgaggg

SEQ ID NO: 19851 - DNA, 21 bp, Homo sapiens
ctcacccttcyttccttaagc

SEQ ID NO: 19852 - DNA, 21 bp, Homo sapiens
cctgggaaggracagagatca

SEQ ID NO: 19853 - DNA, 21 bp, Homo sapiens
cctacaactayacgagcggcg

SEQ ID NO: 19854 - DNA, 21 bp, Homo sapiens
aggtcttgaaygtgtttttga

SEQ ID NO: 19855 - DNA, 21 bp, Homo sapiens
gggacataccrccttcttcca

SEQ ID NO: 19856 - DNA, 21 bp, Homo sapiens
tggaacttctrtggtgtaatt

SEQ ID NO: 19857 - DNA, 21 bp, Homo sapiens
ttgtgctgtaygccagaacca

SEQ ID NO: 19858 - DNA, 21 bp, Homo sapiens
catcattactrctaatagtgt

SEQ ID NO: 19859 - DNA, 21 bp, Homo sapiens
gcctgaatccrtgattaaagg

SEQ ID NO: 19860 - DNA, 21 bp, Homo sapiens
ttccaggctcrctgttgtaat

SEQ ID NO: 19861 - DNA, 21 bp, Homo sapiens
gatttttaatygagtaatggt

SEQ ID NO: 19862 - DNA, 21 bp, Homo sapiens
gttgcagagtygtcgggggtg

SEQ ID NO: 19863 - DNA, 21 bp, Homo sapiens
ccatgaggctkcaggaagaca

SEQ ID NO: 19864 - DNA, 21 bp, Homo sapiens
ctataggattygagtctcccg

SEQ ID NO: 19865 - DNA, 21 bp, Homo sapiens
gtggttatccyccatgaagtc

SEQ ID NO: 19866 - DNA, 21 bp, Homo sapiens
ctcgcattttygaaaaagtgt

SEQ ID NO: 19867 - DNA, 21 bp, Homo sapiens
tgcctctactytttatatttc

SEQ ID NO: 19868 - DNA, 21 bp, Homo sapiens
agctcagagtyatcaagcaat

SEQ ID NO: 19869 - DNA, 21 bp, Homo sapiens
gacagcatcaygtcttcatgt

SEQ ID NO: 19870 - DNA, 21 bp, Homo sapiens
gtagtcttggractgtctgac

SEQ ID NO: 19871 - DNA, 21 bp, Homo sapiens
tgggaaaggtrattctgaatg

SEQ ID NO: 19872 - DNA, 21 bp, Homo sapiens
aaaagagagarcaaaaagcat

SEQ ID NO: 19873 - DNA, 21 bp, Homo sapiens
ttggaggtcayggtgtaggta

SEQ ID NO: 19874 - DNA, 21 bp, Homo sapiens
agagtgtatayatgaacatcc

SEQ ID NO: 19875 - DNA, 21 bp, Homo sapiens
agatgaagaarataagttctg

SEQ ID NO: 19876 - DNA, 21 bp, Homo sapiens
acacatacaakgccatagcag

SEQ ID NO: 19877 - DNA, 21 bp, Homo sapiens
ctacgtacctrttataaatat

SEQ ID NO: 19878 - DNA, 21 bp, Homo sapiens
ctgatggtttyagctttctca

SEQ ID NO: 19879 - DNA, 21 bp, Homo sapiens
cacacaaaagygaccctgata

SEQ ID NO: 19880 - DNA, 21 bp, Homo sapiens
aacgtggtgcrctcttctgta

SEQ ID NO: 19881 - DNA, 21 bp, Homo sapiens
ggaagccactyagacgagaca

SEQ ID NO: 19882 - DNA, 21 bp, Homo sapiens
ttcttaggcgktccataaact

SEQ ID NO: 19883 - DNA, 21 bp, Homo sapiens
gctccaatgtyaccttttcag

SEQ ID NO: 19884 - DNA, 21 bp, Homo sapiens
tgggctgaggrcccactgaat

SEQ ID NO: 19885 - DNA, 21 bp, Homo sapiens
actagggctakgggttttgct

SEQ ID NO: 19886 - DNA, 21 bp, Homo sapiens
gcccacctgtytctcttcctc

SEQ ID NO: 19887 - DNA, 21 bp, Homo sapiens
ggcaggaaggrggacttctgc

SEQ ID NO: 19888 - DNA, 21 bp, Homo sapiens
ctgaaaccccrtagtcctcac

SEQ ID NO: 19889 - DNA, 21 bp, Homo sapiens
ccctcccattmttgacctctc

SEQ ID NO: 19890 - DNA, 21 bp, Homo sapiens
gcaggggcgaygcaggccgag

SEQ ID NO: 19891 - DNA, 21 bp, Homo sapiens
aaaacatagtratatagtttt

SEQ ID NO: 19892 - DNA, 21 bp, Homo sapiens
ttaacactccrccccaacatg

SEQ ID NO: 19893 - DNA, 21 bp, Homo sapiens
ctgcagatctyatgttctggt

SEQ ID NO: 19894 - DNA, 21 bp, Homo sapiens
agcttttcttyttcaatttag

SEQ ID NO: 19895 - DNA, 21 bp, Homo sapiens
gcacgccgagmgagatcttcc

SEQ ID NO: 19896 - DNA, 21 bp, Homo sapiens
ctgaaataggrgaaagcatcc

SEQ ID NO: 19897 - DNA, 21 bp, Homo sapiens
cggaacgagargatgttacgt

SEQ ID NO: 19898 - DNA, 21 bp, Homo sapiens
tgccaaatttyctcattttga

SEQ ID NO: 19899 - DNA, 21 bp, Homo sapiens
tccctccctcrtaaccccagc

SEQ ID NO: 19900 - DNA, 21 bp, Homo sapiens
ataggaaacaygcctggggtc

SEQ ID NO: 19901 - DNA, 21 bp, Homo sapiens
cggggaccggratggagggag

SEQ ID NO: 19902 - DNA, 21 bp, Homo sapiens
ccacccagttkgtagtggttt

SEQ ID NO: 19903 - DNA, 21 bp, Homo sapiens
ggaagtcagayggtgcccctt

SEQ ID NO: 19904 - DNA, 21 bp, Homo sapiens
gcgctgtgtarggctatttcc

SEQ ID NO: 19905 - DNA, 21 bp, Homo sapiens
aaccatcagtrtgatgtatag

SEQ ID NO: 19906 - DNA, 21 bp, Homo sapiens
ccctggaggargtcccatctg

SEQ ID NO: 19907 - DNA, 21 bp, Homo sapiens
tggtgtttctrtgactgttat

SEQ ID NO: 19908 - DNA, 21 bp, Homo sapiens
agaatgtgggygctctgaatt

SEQ ID NO: 19909 - DNA, 21 bp, Homo sapiens
tgccctctgcmaggcttttcc

SEQ ID NO: 19910 - DNA, 21 bp, Homo sapiens
aagcaagatgrgtcttgaaaa

SEQ ID NO: 19911 - DNA, 21 bp, Homo sapiens
aaaaaaaaagrtttaattatg

SEQ ID NO: 19912 - DNA, 21 bp, Homo sapiens
tgccctttacrttgcaagtaa

SEQ ID NO: 19913 - DNA, 21 bp, Homo sapiens
accacacataygcacattgca

SEQ ID NO: 19914 - DNA, 21 bp, Homo sapiens
gttccttgtgycccagccatt

SEQ ID NO: 19915 - DNA, 21 bp, Homo sapiens
cttttgtaaaygggttgtgag

SEQ ID NO: 19916 - DNA, 21 bp, Homo sapiens
caccctttcaytcccttccct

SEQ ID NO: 19917 - DNA, 21 bp, Homo sapiens
tgattagatcyggcactttat

SEQ ID NO: 19918 - DNA, 21 bp, Homo sapiens
tatgtgcttcragaagcttct

SEQ ID NO: 19919 - DNA, 21 bp, Homo sapiens
gtaaaggttgktatgttggaa

SEQ ID NO: 19920 - DNA, 21 bp, Homo sapiens
gtctctttttyattataacca

SEQ ID NO: 19921 - DNA, 21 bp, Homo sapiens
cagggcaagcrgaaaagaaga

SEQ ID NO: 19922 - DNA, 21 bp, Homo sapiens
tgagtcacggygcccagccag

SEQ ID NO: 19923 - DNA, 21 bp, Homo sapiens
cagctgtaagygggtatgttg

SEQ ID NO: 19924 - DNA, 21 bp, Homo sapiens
tttcaataagkccatacctta

SEQ ID NO: 19925 - DNA, 21 bp, Homo sapiens
tcttgcccctygtacacaact

SEQ ID NO: 19926 - DNA, 21 bp, Homo sapiens
attttccctcygctcattctt

SEQ ID NO: 19927 - DNA, 21 bp, Homo sapiens
ggttccattgrtctttcataa

SEQ ID NO: 19928 - DNA, 21 bp, Homo sapiens
agaaaatagargcatgggtaa

SEQ ID NO: 19929 - DNA, 21 bp, Homo sapiens
tggctcttagraaaataaagt

SEQ ID NO: 19930 - DNA, 21 bp, Homo sapiens
cgtttagagamgtcctgccct

SEQ ID NO: 19931 - DNA, 21 bp, Homo sapiens
ttagtcatctygggcttttga

SEQ ID NO: 19932 - DNA, 21 bp, Homo sapiens
gtactttcacyttctgccagg

SEQ ID NO: 19933 - DNA, 21 bp, Homo sapiens
ctccaggagaratatttcagt

SEQ ID NO: 19934 - DNA, 21 bp, Homo sapiens
ggacatatgtrgtccctcgtt

SEQ ID NO: 19935 - DNA, 21 bp, Homo sapiens
tacacccagakactagagtta

SEQ ID NO: 19936 - DNA, 21 bp, Homo sapiens
acgggtgatgraggatgtttt

SEQ ID NO: 19937 - DNA, 21 bp, Homo sapiens
ccttaggagcygccttgatcc

SEQ ID NO: 19938 - DNA, 21 bp, Homo sapiens
ttttacactaytatactatta

SEQ ID NO: 19939 - DNA, 21 bp, Homo sapiens
aaaggcagccrttgtgacagg

SEQ ID NO: 19940 - DNA, 21 bp, Homo sapiens
tctaataatcycatttttaaa

SEQ ID NO: 19941 - DNA, 21 bp, Homo sapiens
aggcgttgatrtggctggcct

SEQ ID NO: 19942 - DNA, 21 bp, Homo sapiens
cccagcggtgragaactactt

SEQ ID NO: 19943 - DNA, 21 bp, Homo sapiens
gaaatattgaygacattcctt

SEQ ID NO: 19944 - DNA, 21 bp, Homo sapiens
agagtgacccygctccacatg

SEQ ID NO: 19945 - DNA, 21 bp, Homo sapiens
gatgccagctyggctggggca

SEQ ID NO: 19946 - DNA, 21 bp, Homo sapiens
gcgttttgaargatgcctttg

SEQ ID NO: 19947 - DNA, 21 bp, Homo sapiens
ctattcaaaayaggcaggacg

SEQ ID NO: 19948 - DNA, 21 bp, Homo sapiens
tacagcaacamacagctccgg

SEQ ID NO: 19949 - DNA, 21 bp, Homo sapiens
aagaactaagyggacatctag

SEQ ID NO: 19950 - DNA, 21 bp, Homo sapiens
cctcgatgaakttctgagttt

SEQ ID NO: 19951 - DNA, 21 bp, Homo sapiens
tgacccaaacygggccactca

SEQ ID NO: 19952 - DNA, 21 bp, Homo sapiens
ggccgtgctcmcaggctgagc

SEQ ID NO: 19953 - DNA, 21 bp, Homo sapiens
ggggtgcttcrgggttcattt

SEQ ID NO: 19954 - DNA, 21 bp, Homo sapiens
ctattcccacracggctccaa

SEQ ID NO: 19955 - DNA, 21 bp, Homo sapiens
ctcagaaaccyttcagtgcta

SEQ ID NO: 19956 - DNA, 21 bp, Homo sapiens
tggaaaggagrggggaagagg

SEQ ID NO: 19957 - DNA, 21 bp, Homo sapiens
tccggatagcrctaaggggga

SEQ ID NO: 19958 - DNA, 21 bp, Homo sapiens
cctctacagcmgtgaaaaata

SEQ ID NO: 19959 - DNA, 21 bp, Homo sapiens
cgaggtgagckgtcgtaattg

SEQ ID NO: 19960 - DNA, 21 bp, Homo sapiens
cctttctgagyggtggagccc

SEQ ID NO: 19961 - DNA, 21 bp, Homo sapiens
gtttgctgtcrttcctttata

SEQ ID NO: 19962 - DNA, 21 bp, Homo sapiens
gtttcttcccyttctatgagg

SEQ ID NO: 19963 - DNA, 21 bp, Homo sapiens
ctcgcctacargacagcagcc

SEQ ID NO: 19964 - DNA, 21 bp, Homo sapiens
cccacggtggragtatttttc

SEQ ID NO: 19965 - DNA, 21 bp, Homo sapiens
aatccaccacygcacgggtcc

SEQ ID NO: 19966 - DNA, 21 bp, Homo sapiens
tccttacaccmtgtaaaaatg

SEQ ID NO: 19967 - DNA, 21 bp, Homo sapiens
tgactgttacygaactgtcaa

SEQ ID NO: 19968 - DNA, 21 bp, Homo sapiens
aatggcgccarggtgcacggt

SEQ ID NO: 19969 - DNA, 21 bp, Homo sapiens
gtgaagtatcytcatgactgc

SEQ ID NO: 19970 - DNA, 21 bp, Homo sapiens
agcagaggcakttctcaaagg

SEQ ID NO: 19971 - DNA, 21 bp, Homo sapiens
gtgggagtgcrgtagaggggt

SEQ ID NO: 19972 - DNA, 21 bp, Homo sapiens
gaagagagagrggagatatct

SEQ ID NO: 19973 - DNA, 21 bp, Homo sapiens
tacacctgcartttggttatg

SEQ ID NO: 19974 - DNA, 21 bp, Homo sapiens
ttgcttatccygctttttaaa

SEQ ID NO: 19975 - DNA, 21 bp, Homo sapiens
aaaatttcctrtcaggtacaa

SEQ ID NO: 19976 - DNA, 21 bp, Homo sapiens
tgtacattcaycttcccattc

SEQ ID NO: 19977 - DNA, 21 bp, Homo sapiens
cttgacatgcrggatccaaaa

SEQ ID NO: 19978 - DNA, 21 bp, Homo sapiens
aggaaggtgcyccttctgcca

SEQ ID NO: 19979 - DNA, 21 bp, Homo sapiens
tctaatctggkctaagaagtg

SEQ ID NO: 19980 - DNA, 21 bp, Homo sapiens
acacacacgcktctctaggtc

SEQ ID NO: 19981 - DNA, 21 bp, Homo sapiens
ttcagtactcyagcacacagt

SEQ ID NO: 19982 - DNA, 21 bp, Homo sapiens
ttgctcttgcrtagttagtga

SEQ ID NO: 19983 - DNA, 21 bp, Homo sapiens
tgtgaaaaacrgatcaacatt

SEQ ID NO: 19984 - DNA, 21 bp, Homo sapiens
actctttttayttaccttgtt

SEQ ID NO: 19985 - DNA, 21 bp, Homo sapiens
ccacccttttyctaatccaag

SEQ ID NO: 19986 - DNA, 21 bp, Homo sapiens
aacatcatgcrgtgattattt

SEQ ID NO: 19987 - DNA, 21 bp, Homo sapiens
tttggaatgcyttgttaaatt

SEQ ID NO: 19988 - DNA, 21 bp, Homo sapiens
aaatgtagcamatcagaagcc

SEQ ID NO: 19989 - DNA, 21 bp, Homo sapiens
agtttagaaarccaagctaca

SEQ ID NO: 19990 - DNA, 21 bp, Homo sapiens
tacatactgaraatgaacaat

SEQ ID NO: 19991 - DNA, 21 bp, Homo sapiens
aatattctacytttatttgtt

SEQ ID NO: 19992 - DNA, 21 bp, Homo sapiens
atatgttaaartttctccatt

SEQ ID NO: 19993 - DNA, 21 bp, Homo sapiens
accatgccagktaccttagta

SEQ ID NO: 19994 - DNA, 21 bp, Homo sapiens
taaagccatcyagttacaata

SEQ ID NO: 19995 - DNA, 21 bp, Homo sapiens
gaaatggaggraaaggaggaa

SEQ ID NO: 19996 - DNA, 21 bp, Homo sapiens
acctttccttrtgtcagtcag

SEQ ID NO: 19997 - DNA, 21 bp, Homo sapiens
ggagttgtatycattatttag

SEQ ID NO: 19998 - DNA, 21 bp, Homo sapiens
agtttaacctrtaaatcattt

SEQ ID NO: 19999 - DNA, 21 bp, Homo sapiens
gcacaatgagmaaagaaatta

SEQ ID NO: 20000 - DNA, 21 bp, Homo sapiens
agttattcagrtttaatcctg

SEQ ID NO: 20001 - DNA, 21 bp, Homo sapiens
ggattatgtgyactttctttt

SEQ ID NO: 20002 - DNA, 21 bp, Homo sapiens
atttctgtccmttctccataa

SEQ ID NO: 20003 - DNA, 21 bp, Homo sapiens
gaccttgacayttagctacat

SEQ ID NO: 20004 - DNA, 21 bp, Homo sapiens
cacagccagcrtgaggcctga

SEQ ID NO: 20005 - DNA, 21 bp, Homo sapiens
cttcctctggrtatagggtag

SEQ ID NO: 20006 - DNA, 21 bp, Homo sapiens
attgtgttggyggctgaaggt

SEQ ID NO: 20007 - DNA, 21 bp, Homo sapiens
caaaataaccrgactatttag

SEQ ID NO: 20008 - DNA, 21 bp, Homo sapiens
ttcctaccccygtgactttgg

SEQ ID NO: 20009 - DNA, 21 bp, Homo sapiens
ataacatcaaygtatccacac

SEQ ID NO: 20010 - DNA, 21 bp, Homo sapiens
gaatggaatartgtttaggca

SEQ ID NO: 20011 - DNA, 21 bp, Homo sapiens
gcaaaatgaaragagtaagca

SEQ ID NO: 20012 - DNA, 21 bp, Homo sapiens
tttcagatgtmatcagttaca

SEQ ID NO: 20013 - DNA, 21 bp, Homo sapiens
ttgaatcttcrtaacagccct

SEQ ID NO: 20014 - DNA, 21 bp, Homo sapiens
taggagtaatkctcaaaatcc

SEQ ID NO: 20015 - DNA, 21 bp, Homo sapiens
tcctcagttgyacaaagactt

SEQ ID NO: 20016 - DNA, 21 bp, Homo sapiens
aaattcatcaygaagtccgtc

SEQ ID NO: 20017 - DNA, 21 bp, Homo sapiens
gatgggaaaaycagatcattc

SEQ ID NO: 20018 - DNA, 21 bp, Homo sapiens
aaagctagtgyaatgttttga

SEQ ID NO: 20019 - DNA, 21 bp, Homo sapiens
gtccaatattkgtgggatggg

SEQ ID NO: 20020 - DNA, 21 bp, Homo sapiens
tagctttgtckacacccagga

SEQ ID NO: 20021 - DNA, 21 bp, Homo sapiens
ataaaatgaartaaatccaca

SEQ ID NO: 20022 - DNA, 21 bp, Homo sapiens
ttaaagaaccrggtcattggg

SEQ ID NO: 20023 - DNA, 21 bp, Homo sapiens
ttccaatgcayggtatttccc

SEQ ID NO: 20024 - DNA, 21 bp, Homo sapiens
atgccctgaayactgttggtt

SEQ ID NO: 20025 - DNA, 21 bp, Homo sapiens
ttccccgacayatactgtgtt

SEQ ID NO: 20026 - DNA, 21 bp, Homo sapiens
agtgtagtgaygcctggttgc

SEQ ID NO: 20027 - DNA, 21 bp, Homo sapiens
tcacatacatrgaatcatata

SEQ ID NO: 20028 - DNA, 21 bp, Homo sapiens
cagacagatcytctcagtcaa

SEQ ID NO: 20029 - DNA, 21 bp, Homo sapiens
ctatgtagaayaaaagtgata

SEQ ID NO: 20030 - DNA, 21 bp, Homo sapiens
aatcatgtcaytgggctcttc

SEQ ID NO: 20031 - DNA, 21 bp, Homo sapiens
actcatcttaragcttttatc

SEQ ID NO: 20032 - DNA, 21 bp, Homo sapiens
tgctaataatraaaaaaaaaa

SEQ ID NO: 20033 - DNA, 21 bp, Homo sapiens
aaacccacacyccaatgttag

SEQ ID NO: 20034 - DNA, 21 bp, Homo sapiens
tttggcttctktgataacact

SEQ ID NO: 20035 - DNA, 21 bp, Homo sapiens
caagaattttkcacatgccac

SEQ ID NO: 20036 - DNA, 21 bp, Homo sapiens
attatcctccrtagaagttgt

SEQ ID NO: 20037 - DNA, 21 bp, Homo sapiens
gttgaatatgmggtacctaca

SEQ ID NO: 20038 - DNA, 21 bp, Homo sapiens
tcaatttcacrttgtatcata

SEQ ID NO: 20039 - DNA, 21 bp, Homo sapiens
aatgccaaatrtacacacctt

SEQ ID NO: 20040 - DNA, 21 bp, Homo sapiens
attgatttacrgttttggctg

SEQ ID NO: 20041 - DNA, 21 bp, Homo sapiens
tccatgggtgmtatgctttgg

SEQ ID NO: 20042 - DNA, 21 bp, Homo sapiens
tttttgattcytgatggtttg

SEQ ID NO: 20043 - DNA, 21 bp, Homo sapiens
ccttagactaytgggggcagg

SEQ ID NO: 20044 - DNA, 21 bp, Homo sapiens
ggttttgtttmctagcattta

SEQ ID NO: 20045 - DNA, 21 bp, Homo sapiens
gaaataggtcraattaaaaga

SEQ ID NO: 20046 - DNA, 21 bp, Homo sapiens
ttccagaccaygtgccctaag

SEQ ID NO: 20047 - DNA, 21 bp, Homo sapiens
tgcccaagttkagccataacc

SEQ ID NO: 20048 - DNA, 21 bp, Homo sapiens
acagaaagcaratgtgacttt

SEQ ID NO: 20049 - DNA, 21 bp, Homo sapiens
ttctagctggrtattttcaga

SEQ ID NO: 20050 - DNA, 21 bp, Homo sapiens
cactgtacttyaaaattaccc

SEQ ID NO: 20051 - DNA, 21 bp, Homo sapiens
caggtgacgaytcatctcagc

SEQ ID NO: 20052 - DNA, 21 bp, Homo sapiens
tagattttagratactgcatc

SEQ ID NO: 20053 - DNA, 21 bp, Homo sapiens
gataaactagyttaggtattt

SEQ ID NO: 20054 - DNA, 21 bp, Homo sapiens
ggcagtgggtyggaggctgca

SEQ ID NO: 20055 - DNA, 21 bp, Homo sapiens
tacaacactcrttgtatctcc

SEQ ID NO: 20056 - DNA, 21 bp, Homo sapiens
tcacagacacmtacagaataa

SEQ ID NO: 20057 - DNA, 21 bp, Homo sapiens
ttcctctttgkggtttgccct

SEQ ID NO: 20058 - DNA, 21 bp, Homo sapiens
ggttgaacccmgttgccttta

SEQ ID NO: 20059 - DNA, 21 bp, Homo sapiens
ttattttttgycttagagatg

SEQ ID NO: 20060 - DNA, 21 bp, Homo sapiens
tcttctcaaaygcatgacaaa

SEQ ID NO: 20061 - DNA, 21 bp, Homo sapiens
ccactaggtcrcacttctcca

SEQ ID NO: 20062 - DNA, 21 bp, Homo sapiens
cacattgcccrggagcctgtg

SEQ ID NO: 20063 - DNA, 21 bp, Homo sapiens
actgaagttcrtttccataaa

SEQ ID NO: 20064 - DNA, 21 bp, Homo sapiens
aacatttacamcacacctact

SEQ ID NO: 20065 - DNA, 21 bp, Homo sapiens
tggtgaatttrtaatcttttc

SEQ ID NO: 20066 - DNA, 21 bp, Homo sapiens
gctagcacatrtgacctgggt

SEQ ID NO: 20067 - DNA, 21 bp, Homo sapiens
gccattccccrtaccttcctt

SEQ ID NO: 20068 - DNA, 21 bp, Homo sapiens
ctaaaaccagyagaaaaccaa

SEQ ID NO: 20069 - DNA, 21 bp, Homo sapiens
tggtggccagrgagaagggtg

SEQ ID NO: 20070 - DNA, 21 bp, Homo sapiens
ccaagtcagtytatctgaaaa

SEQ ID NO: 20071 - DNA, 21 bp, Homo sapiens
aggttttatamcataaggatt

SEQ ID NO: 20072 - DNA, 21 bp, Homo sapiens
ttttacctccygttggaggat

SEQ ID NO: 20073 - DNA, 21 bp, Homo sapiens
aatctctctgkccaggtcatc

SEQ ID NO: 20074 - DNA, 21 bp, Homo sapiens
tccctttgccrggggtttggt

SEQ ID NO: 20075 - DNA, 21 bp, Homo sapiens
catgtggtgtrctgataaggg

SEQ ID NO: 20076 - DNA, 21 bp, Homo sapiens
cccttatctgrataactttat

SEQ ID NO: 20077 - DNA, 21 bp, Homo sapiens
cagaacccctyacatgtcaat

SEQ ID NO: 20078 - DNA, 21 bp, Homo sapiens
tgagagagaarttatgacgtg

SEQ ID NO: 20079 - DNA, 21 bp, Homo sapiens
attttaaaatktattaagaat

SEQ ID NO: 20080 - DNA, 21 bp, Homo sapiens
gttttttgtgytatatgtgta

SEQ ID NO: 20081 - DNA, 21 bp, Homo sapiens
aggaagacccrgatagcaagt

SEQ ID NO: 20082 - DNA, 21 bp, Homo sapiens
actcaaaacckggctggatct

SEQ ID NO: 20083 - DNA, 21 bp, Homo sapiens
gccagttttcrtggttcttaa

SEQ ID NO: 20084 - DNA, 21 bp, Homo sapiens
tggcgcattcyagcccgcggt

SEQ ID NO: 20085 - DNA, 21 bp, Homo sapiens
ggtcttctctrccctctccct

SEQ ID NO: 20086 - DNA, 21 bp, Homo sapiens
gaaagctgctyccaaccatgg

SEQ ID NO: 20087 - DNA, 21 bp, Homo sapiens
cagctttttcytgtgcttagt

SEQ ID NO: 20088 - DNA, 21 bp, Homo sapiens
gaaatgaagcyactcctcagt

SEQ ID NO: 20089 - DNA, 21 bp, Homo sapiens
tcctgggctaygccatggagt

SEQ ID NO: 20090 - DNA, 21 bp, Homo sapiens
ttgtgtcctgyggtgagagag

SEQ ID NO: 20091 - DNA, 21 bp, Homo sapiens
tcactggacayagccacctcc

SEQ ID NO: 20092 - DNA, 21 bp, Homo sapiens
ctgtctcaaartgagcttcca

SEQ ID NO: 20093 - DNA, 21 bp, Homo sapiens
aaggaggaagyttccaacatg

SEQ ID NO: 20094 - DNA, 21 bp, Homo sapiens
gcttatggggygtaaatggtg

SEQ ID NO: 20095 - DNA, 21 bp, Homo sapiens
ggaaatgttcrtgtgctcaaa

SEQ ID NO: 20096 - DNA, 21 bp, Homo sapiens
aaaggaacaarcactacatga

SEQ ID NO: 20097 - DNA, 21 bp, Homo sapiens
gcagtcgttaygttctaaagt

SEQ ID NO: 20098 - DNA, 21 bp, Homo sapiens
tgatgacactytcagcctgtt

SEQ ID NO: 20099 - DNA, 21 bp, Homo sapiens
gacaaatgagmgaaaagatat

SEQ ID NO: 20100 - DNA, 21 bp, Homo sapiens
ccaagttacarttctgcaagt

SEQ ID NO: 20101 - DNA, 21 bp, Homo sapiens
cacagtactayttacttgctt

SEQ ID NO: 20102 - DNA, 21 bp, Homo sapiens
ttcattttttyatgtttgctt

SEQ ID NO: 20103 - DNA, 21 bp, Homo sapiens
agaaaataaakagtaagatgc

SEQ ID NO: 20104 - DNA, 21 bp, Homo sapiens
caatgaatcarttacacatta

SEQ ID NO: 20105 - DNA, 21 bp, Homo sapiens
ttcagcaacarttgaggaaca

SEQ ID NO: 20106 - DNA, 21 bp, Homo sapiens
tcaacatctayataactatgc

SEQ ID NO: 20107 - DNA, 21 bp, Homo sapiens
aggaatgatgyttgacctcaa

SEQ ID NO: 20108 - DNA, 21 bp, Homo sapiens
ttagtgcatcygtacaagaag

SEQ ID NO: 20109 - DNA, 21 bp, Homo sapiens
atgcataaaayatctccctgt

SEQ ID NO: 20110 - DNA, 21 bp, Homo sapiens
atgcttcttcmaaacctatga

SEQ ID NO: 20111 - DNA, 21 bp, Homo sapiens
cttacaacatktatggcaaat

SEQ ID NO: 20112 - DNA, 21 bp, Homo sapiens
agtcagcggcrgcccttacct

SEQ ID NO: 20113 - DNA, 21 bp, Homo sapiens
ggcgcaggcarcagttgttct

SEQ ID NO: 20114 - DNA, 21 bp, Homo sapiens
gaatatgaggrctcttttcct

SEQ ID NO: 20115 - DNA, 21 bp, Homo sapiens
ggtacaaagamtaaccactga

SEQ ID NO: 20116 - DNA, 21 bp, Homo sapiens
tctgtccggargctctggggg

SEQ ID NO: 20117 - DNA, 21 bp, Homo sapiens
taataaaataygtgcaagact

SEQ ID NO: 20118 - DNA, 21 bp, Homo sapiens
cacgtctgcartttacctgga

SEQ ID NO: 20119 - DNA, 21 bp, Homo sapiens
gtgggatcccrttgaaggtgg

SEQ ID NO: 20120 - DNA, 21 bp, Homo sapiens
aataatggatmcttgaatcac

SEQ ID NO: 20121 - DNA, 21 bp, Homo sapiens
ggatgccagaytgttttccct

SEQ ID NO: 20122 - DNA, 21 bp, Homo sapiens
atccatagtgytttccattgc

SEQ ID NO: 20123 - DNA, 21 bp, Homo sapiens
agactagtaartgatgtggga

SEQ ID NO: 20124 - DNA, 21 bp, Homo sapiens
ttgctatagarcataattgct

SEQ ID NO: 20125 - DNA, 21 bp, Homo sapiens
agtagagaagmctgcaaaata

SEQ ID NO: 20126 - DNA, 21 bp, Homo sapiens
atccatcatakagaaaagtga

SEQ ID NO: 20127 - DNA, 21 bp, Homo sapiens
atgttttttaraatgctagag

SEQ ID NO: 20128 - DNA, 21 bp, Homo sapiens
gagctaaaacrcattgagtta

SEQ ID NO: 20129 - DNA, 21 bp, Homo sapiens
ttcagactccrcctgcatttg

SEQ ID NO: 20130 - DNA, 21 bp, Homo sapiens
tttccttcctrtaggttactc

SEQ ID NO: 20131 - DNA, 21 bp, Homo sapiens
aaacatacttygtaattccat

SEQ ID NO: 20132 - DNA, 21 bp, Homo sapiens
gctaagatatrtttaaccaca

SEQ ID NO: 20133 - DNA, 21 bp, Homo sapiens
gacaccactcrtctgtcccct

SEQ ID NO: 20134 - DNA, 21 bp, Homo sapiens
aaagctctttyccttgtaaag

SEQ ID NO: 20135 - DNA, 21 bp, Homo sapiens
atgagtatctygtgagaaatt

SEQ ID NO: 20136 - DNA, 21 bp, Homo sapiens
tgccgattgtkcatttattca

SEQ ID NO: 20137 - DNA, 21 bp, Homo sapiens
aaaggacagargccctgcccc

SEQ ID NO: 20138 - DNA, 21 bp, Homo sapiens
gggaatgaggyacaatcagaa

SEQ ID NO: 20139 - DNA, 21 bp, Homo sapiens
ctggctgtggmgcagttattc

SEQ ID NO: 20140 - DNA, 21 bp, Homo sapiens
tgtttcctttytgtataaggg

SEQ ID NO: 20141 - DNA, 21 bp, Homo sapiens
tgcattgtttyggtagaacac

SEQ ID NO: 20142 - DNA, 21 bp, Homo sapiens
ctttctccttraacatctgtg

SEQ ID NO: 20143 - DNA, 21 bp, Homo sapiens
tcgatatgttkatagcacata

SEQ ID NO: 20144 - DNA, 21 bp, Homo sapiens
gccccagtaarcttccagttg

SEQ ID NO: 20145 - DNA, 21 bp, Homo sapiens
agagagattarcgctatcttt

SEQ ID NO: 20146 - DNA, 21 bp, Homo sapiens
tgaatgaggcygagctgtttg

SEQ ID NO: 20147 - DNA, 21 bp, Homo sapiens
tgcagaaatcrtgtggctgtt

SEQ ID NO: 20148 - DNA, 21 bp, Homo sapiens
ctttctttgcrtttatagcct

SEQ ID NO: 20149 - DNA, 21 bp, Homo sapiens
atgtgcttggmcttcccagcc

SEQ ID NO: 20150 - DNA, 21 bp, Homo sapiens
cagagttcagytggattagaa

SEQ ID NO: 20151 - DNA, 21 bp, Homo sapiens
taacaaatcaygcatgggtaa

SEQ ID NO: 20152 - DNA, 21 bp, Homo sapiens
ttttctccttrgcaatttttt

SEQ ID NO: 20153 - DNA, 21 bp, Homo sapiens
tatcaggtcargtttttggtg

SEQ ID NO: 20154 - DNA, 21 bp, Homo sapiens
acatcattgtrattgcatcaa

SEQ ID NO: 20155 - DNA, 21 bp, Homo sapiens
tcaagaaaacrccggccgggc

SEQ ID NO: 20156 - DNA, 21 bp, Homo sapiens
tccccatcacrtttccaagct

SEQ ID NO: 20157 - DNA, 21 bp, Homo sapiens
catttctccayggtcttccgc

SEQ ID NO: 20158 - DNA, 21 bp, Homo sapiens
tgtcttcacaraaacattttt

SEQ ID NO: 20159 - DNA, 21 bp, Homo sapiens
gtgaacaaagraagggataaa

SEQ ID NO: 20160 - DNA, 21 bp, Homo sapiens
tggctacctgmgttttcaccc

SEQ ID NO: 20161 - DNA, 21 bp, Homo sapiens
gttcaacctcratattttgga

SEQ ID NO: 20162 - DNA, 21 bp, Homo sapiens
caaccattaaratgttatgga

SEQ ID NO: 20163 - DNA, 21 bp, Homo sapiens
gaacagaatamattgctgtta

SEQ ID NO: 20164 - DNA, 21 bp, Homo sapiens
ggccagatacmtgacaaaggc

SEQ ID NO: 20165 - DNA, 21 bp, Homo sapiens
ccttccagcckttggatgttg

SEQ ID NO: 20166 - DNA, 21 bp, Homo sapiens
ataatacgctrgaaccctcaa

SEQ ID NO: 20167 - DNA, 21 bp, Homo sapiens
gggaccaaatrtctgtaatca

SEQ ID NO: 20168 - DNA, 21 bp, Homo sapiens
agctaagtcaraaatatggtg

SEQ ID NO: 20169 - DNA, 21 bp, Homo sapiens
ttgcataactrcatttacaca

SEQ ID NO: 20170 - DNA, 21 bp, Homo sapiens
gatcactgttktaaagctctt

SEQ ID NO: 20171 - DNA, 21 bp, Homo sapiens
tactttagttmagaatggact

SEQ ID NO: 20172 - DNA, 21 bp, Homo sapiens
catacagcatrgttacaagtc

SEQ ID NO: 20173 - DNA, 21 bp, Homo sapiens
tatagtagggmagtattaact

SEQ ID NO: 20174 - DNA, 21 bp, Homo sapiens
aaacaaaggtrcctttttggg

SEQ ID NO: 20175 - DNA, 21 bp, Homo sapiens
gcaaagctgaygggcagagtg

SEQ ID NO: 20176 - DNA, 21 bp, Homo sapiens
gagcaagtccrtaggagaatg

SEQ ID NO: 20177 - DNA, 21 bp, Homo sapiens
ctcaggacacrgggaacttta

SEQ ID NO: 20178 - DNA, 21 bp, Homo sapiens
aatccagtttrttaactactt

SEQ ID NO: 20179 - DNA, 21 bp, Homo sapiens
tcaaaccttgyccccctcctt

SEQ ID NO: 20180 - DNA, 21 bp, Homo sapiens
ccccactctgyttccctttca

SEQ ID NO: 20181 - DNA, 21 bp, Homo sapiens
taccaatgagraattcatcat

SEQ ID NO: 20182 - DNA, 21 bp, Homo sapiens
tcttccgcgaygatgggcaag

SEQ ID NO: 20183 - DNA, 21 bp, Homo sapiens
ccaaactactraatcaggata

SEQ ID NO: 20184 - DNA, 21 bp, Homo sapiens
ttaatgttaaraaatctccca

SEQ ID NO: 20185 - DNA, 21 bp, Homo sapiens
ctcttaaatgrtatttgtttc

SEQ ID NO: 20186 - DNA, 21 bp, Homo sapiens
ttttaaaagaytgtatttgtt

SEQ ID NO: 20187 - DNA, 21 bp, Homo sapiens
gcccatgcccrtggccttcga

SEQ ID NO: 20188 - DNA, 21 bp, Homo sapiens
tcagtgaccayctctaacttc

SEQ ID NO: 20189 - DNA, 21 bp, Homo sapiens
atatgaggtgmttctccaggg

SEQ ID NO: 20190 - DNA, 21 bp, Homo sapiens
agatgttgatyaaagatgaaa

SEQ ID NO: 20191 - DNA, 21 bp, Homo sapiens
tccagcttccrgaggccacct

SEQ ID NO: 20192 - DNA, 21 bp, Homo sapiens
tctgaaggatyctgtatgaag

SEQ ID NO: 20193 - DNA, 21 bp, Homo sapiens
ttcatgatccrcagaacagaa

SEQ ID NO: 20194 - DNA, 21 bp, Homo sapiens
catgtgactckgtgcctaaag

SEQ ID NO: 20195 - DNA, 21 bp, Homo sapiens
attgcctactmttcatttcca

SEQ ID NO: 20196 - DNA, 21 bp, Homo sapiens
taagagtattyttaagtatca

SEQ ID NO: 20197 - DNA, 21 bp, Homo sapiens
tgtatcttatycctgagggtt

SEQ ID NO: 20198 - DNA, 21 bp, Homo sapiens
gatttactacktctacatcaa

SEQ ID NO: 20199 - DNA, 21 bp, Homo sapiens
gacacaaattkgttgaaagtc

SEQ ID NO: 20200 - DNA, 21 bp, Homo sapiens
aatcaatgacrtcaaggaaca

SEQ ID NO: 20201 - DNA, 21 bp, Homo sapiens
cctttacaacrtgacagaagc

SEQ ID NO: 20202 - DNA, 21 bp, Homo sapiens
ggtggaatctyttttaaaacc

SEQ ID NO: 20203 - DNA, 21 bp, Homo sapiens
agggtcttacycctgaaaatg

SEQ ID NO: 20204 - DNA, 21 bp, Homo sapiens
tttagataaaktcttattctg

SEQ ID NO: 20205 - DNA, 21 bp, Homo sapiens
ttcagagaatragcatcagac

SEQ ID NO: 20206 - DNA, 21 bp, Homo sapiens
taaatgaaacrgctgggtaga

SEQ ID NO: 20207 - DNA, 21 bp, Homo sapiens
tttagtttctyggatcctaat

SEQ ID NO: 20208 - DNA, 21 bp, Homo sapiens
aataaagctgygaatcaattc

SEQ ID NO: 20209 - DNA, 21 bp, Homo sapiens
atggaaaataytttgtaggag

SEQ ID NO: 20210 - DNA, 21 bp, Homo sapiens
aagttcggatrtcatgttctc

SEQ ID NO: 20211 - DNA, 21 bp, Homo sapiens
cagaaggtgcrtccactttca

SEQ ID NO: 20212 - DNA, 21 bp, Homo sapiens
cttagtaacamagtcccctta

SEQ ID NO: 20213 - DNA, 21 bp, Homo sapiens
ttatgctatcrtggaaaggaa

SEQ ID NO: 20214 - DNA, 21 bp, Homo sapiens
acagtgatgcrtcagattctt

SEQ ID NO: 20215 - DNA, 21 bp, Homo sapiens
tgcctgagacycattttggtt

SEQ ID NO: 20216 - DNA, 21 bp, Homo sapiens
gagaacccaaycatccagagt

SEQ ID NO: 20217 - DNA, 21 bp, Homo sapiens
agtggctttcrtgttcgtacc

SEQ ID NO: 20218 - DNA, 21 bp, Homo sapiens
tgaagctcacytctgatgctt

SEQ ID NO: 20219 - DNA, 21 bp, Homo sapiens
acaggtggatrcccactaacc

SEQ ID NO: 20220 - DNA, 21 bp, Homo sapiens
ctgcactctgyggggccacct

SEQ ID NO: 20221 - DNA, 21 bp, Homo sapiens
gccctaggaamcagttctcta

SEQ ID NO: 20222 - DNA, 21 bp, Homo sapiens
ttattttgtgycccccacccc

SEQ ID NO: 20223 - DNA, 21 bp, Homo sapiens
atttaggggtrtatgagagtt

SEQ ID NO: 20224 - DNA, 21 bp, Homo sapiens
agagtgctgtrtgactgtgtc

SEQ ID NO: 20225 - DNA, 21 bp, Homo sapiens
caaaagcccaygtgttgttat

SEQ ID NO: 20226 - DNA, 21 bp, Homo sapiens
tagggtggtgrtttgggttag

SEQ ID NO: 20227 - DNA, 21 bp, Homo sapiens
ttctgtctcayactaagcacc

SEQ ID NO: 20228 - DNA, 21 bp, Homo sapiens
ctttgactacrgtgaaatccc

SEQ ID NO: 20229 - DNA, 21 bp, Homo sapiens
ggtaagtcagrgggataggtc

SEQ ID NO: 20230 - DNA, 21 bp, Homo sapiens
cctgttctttyttacacaaga

SEQ ID NO: 20231 - DNA, 21 bp, Homo sapiens
ggtcagattgrccaggaatca

SEQ ID NO: 20232 - DNA, 21 bp, Homo sapiens
acttataaacygtcatctgcc

SEQ ID NO: 20233 - DNA, 21 bp, Homo sapiens
cagagacctgmgtaaatgagg

SEQ ID NO: 20234 - DNA, 21 bp, Homo sapiens
ttccccattcygttttctgtc

SEQ ID NO: 20235 - DNA, 21 bp, Homo sapiens
gaaaagcatcygacacaataa

SEQ ID NO: 20236 - DNA, 21 bp, Homo sapiens
tttataaggtyttgtccaacc

SEQ ID NO: 20237 - DNA, 21 bp, Homo sapiens
gtgactactgrggagttaagt

SEQ ID NO: 20238 - DNA, 21 bp, Homo sapiens
cacccaccacrtgttcagcaa

SEQ ID NO: 20239 - DNA, 21 bp, Homo sapiens
tctttatgacrggtgagtgct

SEQ ID NO: 20240 - DNA, 21 bp, Homo sapiens
gactgatccaktcctaaagca

SEQ ID NO: 20241 - DNA, 21 bp, Homo sapiens
cacattaactrtgccacatct

SEQ ID NO: 20242 - DNA, 21 bp, Homo sapiens
ccatgcctggycttgtgagag

SEQ ID NO: 20243 - DNA, 21 bp, Homo sapiens
ttggtttggamtttttcggta

SEQ ID NO: 20244 - DNA, 21 bp, Homo sapiens
ttactaagtamctaccccata

SEQ ID NO: 20245 - DNA, 21 bp, Homo sapiens
tgtcaaggaakaaatgggtta

SEQ ID NO: 20246 - DNA, 21 bp, Homo sapiens
tcatgttatakgttcatcatt

SEQ ID NO: 20247 - DNA, 21 bp, Homo sapiens
tttaacttggytgatttcaat

SEQ ID NO: 20248 - DNA, 21 bp, Homo sapiens
agcactgttgmccattgagca

SEQ ID NO: 20249 - DNA, 21 bp, Homo sapiens
gcaggattgayggtagtcaca

SEQ ID NO: 20250 - DNA, 21 bp, Homo sapiens
tactaattttktgtcatttga

SEQ ID NO: 20251 - DNA, 21 bp, Homo sapiens
cttaagttacygctatcaggt

SEQ ID NO: 20252 - DNA, 21 bp, Homo sapiens
acatctctgarccttactttc

SEQ ID NO: 20253 - DNA, 21 bp, Homo sapiens
gtattagtccmttttcacact

SEQ ID NO: 20254 - DNA, 21 bp, Homo sapiens
ttataataagyatagattaat

SEQ ID NO: 20255 - DNA, 21 bp, Homo sapiens
gtaactgatcrtatagtacat

SEQ ID NO: 20256 - DNA, 21 bp, Homo sapiens
aaaccaccccyactcaggtga

SEQ ID NO: 20257 - DNA, 21 bp, Homo sapiens
taattttctgrttgaatccac

SEQ ID NO: 20258 - DNA, 21 bp, Homo sapiens
gaatgaggcaktagagaagtg

SEQ ID NO: 20259 - DNA, 21 bp, Homo sapiens
gtactatacaraaggtggagc

SEQ ID NO: 20260 - DNA, 21 bp, Homo sapiens
gttcagccctktcatgaactg

SEQ ID NO: 20261 - DNA, 21 bp, Homo sapiens
cacagtattartttgttacat

SEQ ID NO: 20262 - DNA, 21 bp, Homo sapiens
gatcatttgtrttacttgttc

SEQ ID NO: 20263 - DNA, 21 bp, Homo sapiens
aaaaagtatcmcttgagtgtt

SEQ ID NO: 20264 - DNA, 21 bp, Homo sapiens
cacattatttytatggcaaaa

SEQ ID NO: 20265 - DNA, 21 bp, Homo sapiens
aactccactcrttgtttgata

SEQ ID NO: 20266 - DNA, 21 bp, Homo sapiens
catcttcatcrttctctttct

SEQ ID NO: 20267 - DNA, 21 bp, Homo sapiens
caggtatccartgtgctactg

SEQ ID NO: 20268 - DNA, 21 bp, Homo sapiens
ccaacacccartgctctgtcc

SEQ ID NO: 20269 - DNA, 21 bp, Homo sapiens
tgtggaaaacraattggaggt

SEQ ID NO: 20270 - DNA, 21 bp, Homo sapiens
acaaatgctgytcaaccctcc

SEQ ID NO: 20271 - DNA, 21 bp, Homo sapiens
caataagtacygaatataaaa

SEQ ID NO: 20272 - DNA, 21 bp, Homo sapiens
aaataaaatckatttatgaag

SEQ ID NO: 20273 - DNA, 21 bp, Homo sapiens
aaaggcagcartagattggga

SEQ ID NO: 20274 - DNA, 21 bp, Homo sapiens
tttaaagtgaytgattagccc

SEQ ID NO: 20275 - DNA, 21 bp, Homo sapiens
aatagctatakgaccttaaat

SEQ ID NO: 20276 - DNA, 21 bp, Homo sapiens
ttcctcactayaaaatggaga

SEQ ID NO: 20277 - DNA, 21 bp, Homo sapiens
gagaagggtargagacttagg

SEQ ID NO: 20278 - DNA, 21 bp, Homo sapiens
ttcttaacttrttgggagagt

SEQ ID NO: 20279 - DNA, 21 bp, Homo sapiens
aaactacagaraattggactc

SEQ ID NO: 20280 - DNA, 21 bp, Homo sapiens
gtgttgttctkgctgtcaata

SEQ ID NO: 20281 - DNA, 21 bp, Homo sapiens
tcctacctgtrtgcgagttca

SEQ ID NO: 20282 - DNA, 21 bp, Homo sapiens
taaattgtaamttgtgtaact

SEQ ID NO: 20283 - DNA, 21 bp, Homo sapiens
ttaaaggtacyctatcaatca

SEQ ID NO: 20284 - DNA, 21 bp, Homo sapiens
ttctttttgcrgatctacttg

SEQ ID NO: 20285 - DNA, 21 bp, Homo sapiens
ctgacttctgytaatacccag

SEQ ID NO: 20286 - DNA, 21 bp, Homo sapiens
caggttagttytgtggccaag

SEQ ID NO: 20287 - DNA, 21 bp, Homo sapiens
tcctgaatccrttaggcaatg

SEQ ID NO: 20288 - DNA, 21 bp, Homo sapiens
acccattatakgcatcacctc

SEQ ID NO: 20289 - DNA, 21 bp, Homo sapiens
atgtcagaggkaaatcaaaag

SEQ ID NO: 20290 - DNA, 21 bp, Homo sapiens
ttaccaaaaaygtctctgctc

SEQ ID NO: 20291 - DNA, 21 bp, Homo sapiens
ccacctcccartaggagtcaa

SEQ ID NO: 20292 - DNA, 21 bp, Homo sapiens
tgataggaaaytggcatctag

SEQ ID NO: 20293 - DNA, 21 bp, Homo sapiens
caaatcgtagyacccaaaaga

SEQ ID NO: 20294 - DNA, 21 bp, Homo sapiens
tgggtcctttmacaattttcc

SEQ ID NO: 20295 - DNA, 21 bp, Homo sapiens
ctccacaaccytaactgcaaa

SEQ ID NO: 20296 - DNA, 21 bp, Homo sapiens
acattagtcartgctggaaat

SEQ ID NO: 20297 - DNA, 21 bp, Homo sapiens
tgaggtgtttrttcttacaga

SEQ ID NO: 20298 - DNA, 21 bp, Homo sapiens
aaaatacttayagaaaaaatt

SEQ ID NO: 20299 - DNA, 21 bp, Homo sapiens
tgaacacaackgtattctctt

SEQ ID NO: 20300 - DNA, 21 bp, Homo sapiens
gcactcccttrggagtgggaa

SEQ ID NO: 20301 - DNA, 21 bp, Homo sapiens
ttaggggctamtgtagctggt

SEQ ID NO: 20302 - DNA, 21 bp, Homo sapiens
tgctaacctcmtaatacttat

SEQ ID NO: 20303 - DNA, 21 bp, Homo sapiens
tttacatgaayaaaaaattac

SEQ ID NO: 20304 - DNA, 21 bp, Homo sapiens
gctcctagatmcagatagata

SEQ ID NO: 20305 - DNA, 21 bp, Homo sapiens
atggtctcacyaggaggagaa

SEQ ID NO: 20306 - DNA, 21 bp, Homo sapiens
atagattcaaytgaggagtat

SEQ ID NO: 20307 - DNA, 21 bp, Homo sapiens
aatgattagargtttactttg

SEQ ID NO: 20308 - DNA, 21 bp, Homo sapiens
tgggtgtagargcaggaggtc

SEQ ID NO: 20309 - DNA, 21 bp, Homo sapiens
ataaaatacaytccaattcta

SEQ ID NO: 20310 - DNA, 21 bp, Homo sapiens
gaagaaataayatagtagtat

SEQ ID NO: 20311 - DNA, 21 bp, Homo sapiens
agcaaccatcytcattctaaa

SEQ ID NO: 20312 - DNA, 21 bp, Homo sapiens
atgatggactkaattgctaag

SEQ ID NO: 20313 - DNA, 21 bp, Homo sapiens
tactcattttrcatattaaaa

SEQ ID NO: 20314 - DNA, 21 bp, Homo sapiens
actctgggctkctgtaacaga

SEQ ID NO: 20315 - DNA, 21 bp, Homo sapiens
ttttcacctayagcatgttta

SEQ ID NO: 20316 - DNA, 21 bp, Homo sapiens
aaacatgacarctacatactc

SEQ ID NO: 20317 - DNA, 21 bp, Homo sapiens
ttcagtggagraaggaagtgc

SEQ ID NO: 20318 - DNA, 21 bp, Homo sapiens
aaaactagtcrgtattactat

SEQ ID NO: 20319 - DNA, 21 bp, Homo sapiens
gtaccctttcraaagaaagct

SEQ ID NO: 20320 - DNA, 21 bp, Homo sapiens
agaatattatrgtgaaatggg

SEQ ID NO: 20321 - DNA, 21 bp, Homo sapiens
aagacacaaakgcaagaagtg

SEQ ID NO: 20322 - DNA, 21 bp, Homo sapiens
ccatcttcaamtctcggtaca

SEQ ID NO: 20323 - DNA, 21 bp, Homo sapiens
agagatgaccrggtaggctca

SEQ ID NO: 20324 - DNA, 21 bp, Homo sapiens
gcagtgaggcrggccacctca

SEQ ID NO: 20325 - DNA, 21 bp, Homo sapiens
ccctaattttyttctttacct

SEQ ID NO: 20326 - DNA, 21 bp, Homo sapiens
aatagaaaaayccatgctttt

SEQ ID NO: 20327 - DNA, 21 bp, Homo sapiens
tggattccaaytgacggacct

SEQ ID NO: 20328 - DNA, 21 bp, Homo sapiens
ctttttctgcrtgttattgtg

SEQ ID NO: 20329 - DNA, 21 bp, Homo sapiens
cttgggacttyggagacagac

SEQ ID NO: 20330 - DNA, 21 bp, Homo sapiens
gtccacctaakaggataatag

SEQ ID NO: 20331 - DNA, 21 bp, Homo sapiens
ggtatctcctyattgaccccg

SEQ ID NO: 20332 - DNA, 21 bp, Homo sapiens
agcagagtggytacggtgggc

SEQ ID NO: 20333 - DNA, 21 bp, Homo sapiens
ctaacacataktttgtatgtc

SEQ ID NO: 20334 - DNA, 21 bp, Homo sapiens
ttctaccccaygaccctggat

SEQ ID NO: 20335 - DNA, 21 bp, Homo sapiens
cttccagaagraccgcaagat

SEQ ID NO: 20336 - DNA, 21 bp, Homo sapiens
tgaccctcacrcttcccagca

SEQ ID NO: 20337 - DNA, 21 bp, Homo sapiens
tctacctcctytgtcatgggc

SEQ ID NO: 20338 - DNA, 21 bp, Homo sapiens
atagcatcagytgtatatata

SEQ ID NO: 20339 - DNA, 21 bp, Homo sapiens
gttattatccyttaggaagga

SEQ ID NO: 20340 - DNA, 21 bp, Homo sapiens
agcctgtttcrctgcccctcc

SEQ ID NO: 20341 - DNA, 21 bp, Homo sapiens
cctcacttatrgtggcagcaa

SEQ ID NO: 20342 - DNA, 21 bp, Homo sapiens
ttggttcttayctcttaactt

SEQ ID NO: 20343 - DNA, 21 bp, Homo sapiens
ctgtggtcctmaccaccttgt

SEQ ID NO: 20344 - DNA, 21 bp, Homo sapiens
gaaggtgaaakttacctgccc

SEQ ID NO: 20345 - DNA, 21 bp, Homo sapiens
acagaaaaggygcaaggctcc

SEQ ID NO: 20346 - DNA, 21 bp, Homo sapiens
gtttaaaatgyaataccctca

SEQ ID NO: 20347 - DNA, 21 bp, Homo sapiens
aaaaacttgaratggacaata

SEQ ID NO: 20348 - DNA, 21 bp, Homo sapiens
gtgattgggakacagtcaagg

SEQ ID NO: 20349 - DNA, 21 bp, Homo sapiens
ctcaggtaatrggatggagag

SEQ ID NO: 20350 - DNA, 21 bp, Homo sapiens
tagagaaatgrttcttgtctt

SEQ ID NO: 20351 - DNA, 21 bp, Homo sapiens
ctgtcgcagcygcgggtcggg

SEQ ID NO: 20352 - DNA, 21 bp, Homo sapiens
agtagggcttygctgagtctc

SEQ ID NO: 20353 - DNA, 21 bp, Homo sapiens
tccttttaacrgaggaagagc

SEQ ID NO: 20354 - DNA, 21 bp, Homo sapiens
caaaatatccratggttatga

SEQ ID NO: 20355 - DNA, 21 bp, Homo sapiens
aattatttttkaggttgttga

SEQ ID NO: 20356 - DNA, 21 bp, Homo sapiens
ctccttttgcrtctctttcac

SEQ ID NO: 20357 - DNA, 21 bp, Homo sapiens
aatcaaatatrtttattgttc

SEQ ID NO: 20358 - DNA, 21 bp, Homo sapiens
gcttaaaacarcagaatgaag

SEQ ID NO: 20359 - DNA, 21 bp, Homo sapiens
taggttaaatrataaaaccga

SEQ ID NO: 20360 - DNA, 21 bp, Homo sapiens
acaaaactgcrtatctataat

SEQ ID NO: 20361 - DNA, 21 bp, Homo sapiens
tatctttttcygatttgtatt

SEQ ID NO: 20362 - DNA, 21 bp, Homo sapiens
gttttctagtytggctgatag

SEQ ID NO: 20363 - DNA, 21 bp, Homo sapiens
ttgttaatccrtctgttgagt

SEQ ID NO: 20364 - DNA, 21 bp, Homo sapiens
tccatctctcyttagagcctg

SEQ ID NO: 20365 - DNA, 21 bp, Homo sapiens
aagaaaactcrgagacttcat

SEQ ID NO: 20366 - DNA, 21 bp, Homo sapiens
ttttactgatmtactgggaac

SEQ ID NO: 20367 - DNA, 21 bp, Homo sapiens
ctgcctgcctyatcctgaact

SEQ ID NO: 20368 - DNA, 21 bp, Homo sapiens
ttgtgtgtctrtgtgttgtta

SEQ ID NO: 20369 - DNA, 21 bp, Homo sapiens
ttggtaagagrgtaacagctg

SEQ ID NO: 20370 - DNA, 21 bp, Homo sapiens
tgttgttgtcrtaagtacagt

SEQ ID NO: 20371 - DNA, 21 bp, Homo sapiens
tgggatcgtcrtggggagcct

SEQ ID NO: 20372 - DNA, 21 bp, Homo sapiens
gcaagattggratggctccct

SEQ ID NO: 20373 - DNA, 21 bp, Homo sapiens
cctacatgatyggtgacaata

SEQ ID NO: 20374 - DNA, 21 bp, Homo sapiens
tgaggcacagrgggtggagtg

SEQ ID NO: 20375 - DNA, 21 bp, Homo sapiens
atagtcaaatyggaattttga

SEQ ID NO: 20376 - DNA, 21 bp, Homo sapiens
aaatccaacartctgataatg

SEQ ID NO: 20377 - DNA, 21 bp, Homo sapiens
ctctaggaaargattaagaca

SEQ ID NO: 20378 - DNA, 21 bp, Homo sapiens
agttagtaatmggggaattca

SEQ ID NO: 20379 - DNA, 21 bp, Homo sapiens
tggttgttttraatgtttcaa

SEQ ID NO: 20380 - DNA, 21 bp, Homo sapiens
aagcttagttrcttttgaatg

SEQ ID NO: 20381 - DNA, 21 bp, Homo sapiens
tggttacactytaaacatcta

SEQ ID NO: 20382 - DNA, 21 bp, Homo sapiens
caatagaaagrtagaagtacg

SEQ ID NO: 20383 - DNA, 21 bp, Homo sapiens
gcaatagttaycaaataggaa

SEQ ID NO: 20384 - DNA, 21 bp, Homo sapiens
tgttagtaackatccttcttc

SEQ ID NO: 20385 - DNA, 21 bp, Homo sapiens
cactttggagrttctctaaag

SEQ ID NO: 20386 - DNA, 21 bp, Homo sapiens
gcagagctacrtgctattatt

SEQ ID NO: 20387 - DNA, 21 bp, Homo sapiens
acttttgataygcctatgata

SEQ ID NO: 20388 - DNA, 21 bp, Homo sapiens
tatgtgacttraaggtcacag

SEQ ID NO: 20389 - DNA, 21 bp, Homo sapiens
atagtaatctkttacgctctg

SEQ ID NO: 20390 - DNA, 21 bp, Homo sapiens
gccaagatcarggaggatcaa

SEQ ID NO: 20391 - DNA, 21 bp, Homo sapiens
aacaatttgcygaagatgatg

SEQ ID NO: 20392 - DNA, 21 bp, Homo sapiens
gaataaaatamctttcatcaa

SEQ ID NO: 20393 - DNA, 21 bp, Homo sapiens
ttctgcttatyctcagtctct

SEQ ID NO: 20394 - DNA, 21 bp, Homo sapiens
gatgatgccartttaatttat

SEQ ID NO: 20395 - DNA, 21 bp, Homo sapiens
acgtttgtaartatcagtggt

SEQ ID NO: 20396 - DNA, 21 bp, Homo sapiens
caaatgaaatmtattctgaat

SEQ ID NO: 20397 - DNA, 21 bp, Homo sapiens
aaattatcccktgcctcttcc

SEQ ID NO: 20398 - DNA, 21 bp, Homo sapiens
catagccagakgggtggctca

SEQ ID NO: 20399 - DNA, 21 bp, Homo sapiens
gaacagtaagrcatcctttat

SEQ ID NO: 20400 - DNA, 21 bp, Homo sapiens
gattcatccartattcaatcc

SEQ ID NO: 20401 - DNA, 21 bp, Homo sapiens
cacaaagaaayattatatgca

SEQ ID NO: 20402 - DNA, 21 bp, Homo sapiens
atattattttyatgcagattt

SEQ ID NO: 20403 - DNA, 21 bp, Homo sapiens
ccaatgctctktacataagtt

SEQ ID NO: 20404 - DNA, 21 bp, Homo sapiens
ttcccaaaatrtttattcact

SEQ ID NO: 20405 - DNA, 21 bp, Homo sapiens
ctcatttgcartcgtgatctc

SEQ ID NO: 20406 - DNA, 21 bp, Homo sapiens
gcatttatgamaaatctggat

SEQ ID NO: 20407 - DNA, 21 bp, Homo sapiens
aaacacaaatkatatgtgtag

SEQ ID NO: 20408 - DNA, 21 bp, Homo sapiens
tttttaacatyatctgaattc

SEQ ID NO: 20409 - DNA, 21 bp, Homo sapiens
caaaactccartacatcttct

SEQ ID NO: 20410 - DNA, 21 bp, Homo sapiens
aactgaggaamcaaaatattt

SEQ ID NO: 20411 - DNA, 21 bp, Homo sapiens
tcattctgctrttcagtctac

SEQ ID NO: 20412 - DNA, 21 bp, Homo sapiens
gaggagcaaaraatcaaatta

SEQ ID NO: 20413 - DNA, 21 bp, Homo sapiens
aacattttagrctgtggttct

SEQ ID NO: 20414 - DNA, 21 bp, Homo sapiens
caacctcagtraaacaatgct

SEQ ID NO: 20415 - DNA, 21 bp, Homo sapiens
aatttatttcyaatgaatatc

SEQ ID NO: 20416 - DNA, 21 bp, Homo sapiens
tccacctgacmaatattgaag

SEQ ID NO: 20417 - DNA, 21 bp, Homo sapiens
aaacatctaarggacatttca

SEQ ID NO: 20418 - DNA, 21 bp, Homo sapiens
ttcaaatcttyaggtggttag

SEQ ID NO: 20419 - DNA, 21 bp, Homo sapiens
ggcatgtcacmtaagcttcct

SEQ ID NO: 20420 - DNA, 21 bp, Homo sapiens
agattcacccrcaagtggaat

SEQ ID NO: 20421 - DNA, 21 bp, Homo sapiens
aaataaataartaaaatagaa

SEQ ID NO: 20422 - DNA, 21 bp, Homo sapiens
aggtatttctygcagtcttgc

SEQ ID NO: 20423 - DNA, 21 bp, Homo sapiens
tttcttttgcrgtattttcag

SEQ ID NO: 20424 - DNA, 21 bp, Homo sapiens
tttcttcctcrgtgggggttc

SEQ ID NO: 20425 - DNA, 21 bp, Homo sapiens
attattattaktagtagtagt

SEQ ID NO: 20426 - DNA, 21 bp, Homo sapiens
ttatcaccaaygttcactatt

SEQ ID NO: 20427 - DNA, 21 bp, Homo sapiens
tgaactgaggkcagagaactc

SEQ ID NO: 20428 - DNA, 21 bp, Homo sapiens
aggccctgacyccgatactgc

SEQ ID NO: 20429 - DNA, 21 bp, Homo sapiens
tgtgtgggggygggaattaca

SEQ ID NO: 20430 - DNA, 21 bp, Homo sapiens
gctatcaaaaygaatcccagg

SEQ ID NO: 20431 - DNA, 21 bp, Homo sapiens
gggagagaaaytccgccaggg

SEQ ID NO: 20432 - DNA, 21 bp, Homo sapiens
gtcatcttcaratattattga

SEQ ID NO: 20433 - DNA, 21 bp, Homo sapiens
ggccagaccayaacccattca

SEQ ID NO: 20434 - DNA, 21 bp, Homo sapiens
gattagacagrtcaggttaag

SEQ ID NO: 20435 - DNA, 21 bp, Homo sapiens
cagcatttcaygaacaccctt

SEQ ID NO: 20436 - DNA, 21 bp, Homo sapiens
tacgttcatayttccaaagac

SEQ ID NO: 20437 - DNA, 21 bp, Homo sapiens
tgccacaagcyggatggcccc

SEQ ID NO: 20438 - DNA, 21 bp, Homo sapiens
gaattgccagmccccaattta

SEQ ID NO: 20439 - DNA, 21 bp, Homo sapiens
atacagagtcyaatttttact

SEQ ID NO: 20440 - DNA, 21 bp, Homo sapiens
tgtcaaacackaagattcaag

SEQ ID NO: 20441 - DNA, 21 bp, Homo sapiens
aatttcaaagytgtcacttat

SEQ ID NO: 20442 - DNA, 21 bp, Homo sapiens
agccacccagmgaaatggtgc

SEQ ID NO: 20443 - DNA, 21 bp, Homo sapiens
gacagttcttyaaaaattaaa

SEQ ID NO: 20444 - DNA, 21 bp, Homo sapiens
gctattttackgtcaatgttc

SEQ ID NO: 20445 - DNA, 21 bp, Homo sapiens
ctcttaatggratcttttgat

SEQ ID NO: 20446 - DNA, 21 bp, Homo sapiens
gttgctcaggrcatctgaact

SEQ ID NO: 20447 - DNA, 21 bp, Homo sapiens
tttggctggtratctgtgtaa

SEQ ID NO: 20448 - DNA, 21 bp, Homo sapiens
gtctgagcttrgcccaggagg

SEQ ID NO: 20449 - DNA, 21 bp, Homo sapiens
tgtgtgtgctygtggtacaca

SEQ ID NO: 20450 - DNA, 21 bp, Homo sapiens
gctgagaaggraaggatgaag

SEQ ID NO: 20451 - DNA, 21 bp, Homo sapiens
cctttaacccycgagctcatt

SEQ ID NO: 20452 - DNA, 21 bp, Homo sapiens
ggcttttctgkgtcacacagt

SEQ ID NO: 20453 - DNA, 21 bp, Homo sapiens
gcaacacaaargcctcagcct

SEQ ID NO: 20454 - DNA, 21 bp, Homo sapiens
ttggggactcmaagacaggac

SEQ ID NO: 20455 - DNA, 21 bp, Homo sapiens
tggtattttgktcaatcatta

SEQ ID NO: 20456 - DNA, 21 bp, Homo sapiens
cctgttttatmcagagagaca

SEQ ID NO: 20457 - DNA, 21 bp, Homo sapiens
tagtcttttcrttataccttt

SEQ ID NO: 20458 - DNA, 21 bp, Homo sapiens
atgctgtgtgyccctggcttc

SEQ ID NO: 20459 - DNA, 21 bp, Homo sapiens
cccttacttgmatctgagccg

SEQ ID NO: 20460 - DNA, 21 bp, Homo sapiens
tcttcaaatakacctatagat

SEQ ID NO: 20461 - DNA, 21 bp, Homo sapiens
atggacaaagrccagctgaag

SEQ ID NO: 20462 - DNA, 21 bp, Homo sapiens
gagttcttcaraagtggttat

SEQ ID NO: 20463 - DNA, 21 bp, Homo sapiens
gctctaccccrggaggaagta

SEQ ID NO: 20464 - DNA, 21 bp, Homo sapiens
gatatacaaaraggttagaat

SEQ ID NO: 20465 - DNA, 21 bp, Homo sapiens
aacacagaaarcctaagccat

SEQ ID NO: 20466 - DNA, 21 bp, Homo sapiens
tcctgggaackcagacccggc

SEQ ID NO: 20467 - DNA, 21 bp, Homo sapiens
taacagagatyaagtaaatta

SEQ ID NO: 20468 - DNA, 21 bp, Homo sapiens
tctgaactttkcaaattgtct

SEQ ID NO: 20469 - DNA, 21 bp, Homo sapiens
gacacaacackggtgagacac

SEQ ID NO: 20470 - DNA, 21 bp, Homo sapiens
ctcttgctgtycttccctgtc

SEQ ID NO: 20471 - DNA, 21 bp, Homo sapiens
aattagccacktaagaagatt

SEQ ID NO: 20472 - DNA, 21 bp, Homo sapiens
ttgctcctaamttgatttcag

SEQ ID NO: 20473 - DNA, 21 bp, Homo sapiens
cagaactgtcrctcccctcta

SEQ ID NO: 20474 - DNA, 21 bp, Homo sapiens
cgtgcatcatyaataatgctc

SEQ ID NO: 20475 - DNA, 21 bp, Homo sapiens
gacatagaccrtagaattgga

SEQ ID NO: 20476 - DNA, 21 bp, Homo sapiens
gccagcatacracacaaggtc

SEQ ID NO: 20477 - DNA, 21 bp, Homo sapiens
acaaggacctyaatggagagg

SEQ ID NO: 20478 - DNA, 21 bp, Homo sapiens
tatctgaccgrctctccccat

SEQ ID NO: 20479 - DNA, 21 bp, Homo sapiens
tgtatgctctyttttacccaa

SEQ ID NO: 20480 - DNA, 21 bp, Homo sapiens
aacttctgggratgtggtgaa

SEQ ID NO: 20481 - DNA, 21 bp, Homo sapiens
taggaattcamattcaggtcc

SEQ ID NO: 20482 - DNA, 21 bp, Homo sapiens
taaaccatgakgccttctttt

SEQ ID NO: 20483 - DNA, 21 bp, Homo sapiens
atggtgccaayagacttgttc

SEQ ID NO: 20484 - DNA, 21 bp, Homo sapiens
aagttgcatcrcagtgcttat

SEQ ID NO: 20485 - DNA, 21 bp, Homo sapiens
tattagctgaraaatttctag

SEQ ID NO: 20486 - DNA, 21 bp, Homo sapiens
gccacattttmtttgtgtatt

SEQ ID NO: 20487 - DNA, 21 bp, Homo sapiens
ccatgtttagygggaaattga

SEQ ID NO: 20488 - DNA, 21 bp, Homo sapiens
ggcctgccacrgaggagctcc

SEQ ID NO: 20489 - DNA, 21 bp, Homo sapiens
aaaacccagcyggaaaagcca

SEQ ID NO: 20490 - DNA, 21 bp, Homo sapiens
ctggggatgtrtgtttaactt

SEQ ID NO: 20491 - DNA, 21 bp, Homo sapiens
gggaaaccaaygctcagaagg

SEQ ID NO: 20492 - DNA, 21 bp, Homo sapiens
ctaggggttgygcatttcatg

SEQ ID NO: 20493 - DNA, 21 bp, Homo sapiens
cccctcacccycttctgggcc

SEQ ID NO: 20494 - DNA, 21 bp, Homo sapiens
atgtcagttcmaatccaaaga

SEQ ID NO: 20495 - DNA, 21 bp, Homo sapiens
gggtctactargaatggagaa

SEQ ID NO: 20496 - DNA, 21 bp, Homo sapiens
ggagactttamcagttaggga

SEQ ID NO: 20497 - DNA, 21 bp, Homo sapiens
aatttatacarctatagcagg

SEQ ID NO: 20498 - DNA, 21 bp, Homo sapiens
aaacgcctgcrctggaaagtt

SEQ ID NO: 20499 - DNA, 21 bp, Homo sapiens
tgttactaatrtgggttacat

SEQ ID NO: 20500 - DNA, 21 bp, Homo sapiens
acaagcactcrgctgtgggcc

SEQ ID NO: 20501 - DNA, 21 bp, Homo sapiens
tgtctctagtyatccatccac

SEQ ID NO: 20502 - DNA, 21 bp, Homo sapiens
ttggcccctaktaacctagta

SEQ ID NO: 20503 - DNA, 21 bp, Homo sapiens
cctggggaagyaaaataaaga

SEQ ID NO: 20504 - DNA, 21 bp, Homo sapiens
agctttgtgaygactgacgtg

SEQ ID NO: 20505 - DNA, 21 bp, Homo sapiens
tgcctaggccratgctctgct

SEQ ID NO: 20506 - DNA, 21 bp, Homo sapiens
ggcctgcaggraaattcagct

SEQ ID NO: 20507 - DNA, 21 bp, Homo sapiens
gagtaaatttycttgggcttt

SEQ ID NO: 20508 - DNA, 21 bp, Homo sapiens
tgaaatcgtgkctaatgcagg

SEQ ID NO: 20509 - DNA, 21 bp, Homo sapiens
ccaggtctcamaaccacagct

SEQ ID NO: 20510 - DNA, 21 bp, Homo sapiens
gtcatgatcartcttaacttt

SEQ ID NO: 20511 - DNA, 21 bp, Homo sapiens
tgtgggatcayctcctgcatt

SEQ ID NO: 20512 - DNA, 21 bp, Homo sapiens
ttactgctgtytcataacaaa

SEQ ID NO: 20513 - DNA, 21 bp, Homo sapiens
tttttcctttycagcccaaaa

SEQ ID NO: 20514 - DNA, 21 bp, Homo sapiens
gaatttaggcracatgcagaa

SEQ ID NO: 20515 - DNA, 21 bp, Homo sapiens
tgtaggagacrcacaggagca

SEQ ID NO: 20516 - DNA, 21 bp, Homo sapiens
atgaggcaagrtgaagttgtg

SEQ ID NO: 20517 - DNA, 21 bp, Homo sapiens
ggttgaaacayctctgacaga

SEQ ID NO: 20518 - DNA, 21 bp, Homo sapiens
gctgctttgtygagtctccta

SEQ ID NO: 20519 - DNA, 21 bp, Homo sapiens
cttaagagaaygttcacatat

SEQ ID NO: 20520 - DNA, 21 bp, Homo sapiens
gtctgggagtmgctgtcttcc

SEQ ID NO: 20521 - DNA, 21 bp, Homo sapiens
agaggaaaaaytctgataagt

SEQ ID NO: 20522 - DNA, 21 bp, Homo sapiens
gttcacacctmtttccctctc

SEQ ID NO: 20523 - DNA, 21 bp, Homo sapiens
tttgatcccayatctgttttt

SEQ ID NO: 20524 - DNA, 21 bp, Homo sapiens
aatagcaacayctggcaaaaa

SEQ ID NO: 20525 - DNA, 21 bp, Homo sapiens
ttagtagctcytcctgcagca

SEQ ID NO: 20526 - DNA, 21 bp, Homo sapiens
ccgaatcgatrctgcctatgg

SEQ ID NO: 20527 - DNA, 21 bp, Homo sapiens
ctggatgttgyaagacaaagg

SEQ ID NO: 20528 - DNA, 21 bp, Homo sapiens
atggtattcarttatgatttc

SEQ ID NO: 20529 - DNA, 21 bp, Homo sapiens
gcgcaagctgrtatgccaggt

SEQ ID NO: 20530 - DNA, 21 bp, Homo sapiens
tctcactcatkttttgactaa

SEQ ID NO: 20531 - DNA, 21 bp, Homo sapiens
gtaatgttccyctctgacctt

SEQ ID NO: 20532 - DNA, 21 bp, Homo sapiens
gggacctcctmtccagtaagt

SEQ ID NO: 20533 - DNA, 21 bp, Homo sapiens
agaaaactacrcaatatattt

SEQ ID NO: 20534 - DNA, 21 bp, Homo sapiens
gagagaaattraaagagacct

SEQ ID NO: 20535 - DNA, 21 bp, Homo sapiens
aggctggatargagggtgtcc

SEQ ID NO: 20536 - DNA, 21 bp, Homo sapiens
ataagggaggygcctgggcta

SEQ ID NO: 20537 - DNA, 21 bp, Homo sapiens
tatgataagtrtataagcaca

SEQ ID NO: 20538 - DNA, 21 bp, Homo sapiens
tttcttccagytatctgtggg

SEQ ID NO: 20539 - DNA, 21 bp, Homo sapiens
aagactatgcrtttgtcaaac

SEQ ID NO: 20540 - DNA, 21 bp, Homo sapiens
gcagagaggcrcatatgttac

SEQ ID NO: 20541 - DNA, 21 bp, Homo sapiens
atttaacaggrtacctgacca

SEQ ID NO: 20542 - DNA, 21 bp, Homo sapiens
ctgtgcagccragccaccccc

SEQ ID NO: 20543 - DNA, 21 bp, Homo sapiens
ccacagagacrcatcttacta

SEQ ID NO: 20544 - DNA, 21 bp, Homo sapiens
gtatcagtttrcaaatggatt

SEQ ID NO: 20545 - DNA, 21 bp, Homo sapiens
gatatagtttyatacatatag

SEQ ID NO: 20546 - DNA, 21 bp, Homo sapiens
gcattgagggkctagggatga

SEQ ID NO: 20547 - DNA, 21 bp, Homo sapiens
gttctttcagrcagactcagg

SEQ ID NO: 20548 - DNA, 21 bp, Homo sapiens
gcatccttagkggcgctgtgc

SEQ ID NO: 20549 - DNA, 21 bp, Homo sapiens
ttcaggtcccygcttgtattc

SEQ ID NO: 20550 - DNA, 21 bp, Homo sapiens
ttctagacacytccttaccag

SEQ ID NO: 20551 - DNA, 21 bp, Homo sapiens
aaggtgtgtgyttggacttca

SEQ ID NO: 20552 - DNA, 21 bp, Homo sapiens
aaacttcccaraataaaccct

SEQ ID NO: 20553 - DNA, 21 bp, Homo sapiens
ctttattcatrttcgcagaat

SEQ ID NO: 20554 - DNA, 21 bp, Homo sapiens
acctctacttyagatattctg

SEQ ID NO: 20555 - DNA, 21 bp, Homo sapiens
caccaccacaragatcatcct

SEQ ID NO: 20556 - DNA, 21 bp, Homo sapiens
tgcattgttartaatagcaaa

SEQ ID NO: 20557 - DNA, 21 bp, Homo sapiens
ttttaggcttkcctccattat

SEQ ID NO: 20558 - DNA, 21 bp, Homo sapiens
gttgatggggkccctgttata

SEQ ID NO: 20559 - DNA, 21 bp, Homo sapiens
aggtaaaatgrtaattctggc

SEQ ID NO: 20560 - DNA, 21 bp, Homo sapiens
cttcccactcytagttttcct

SEQ ID NO: 20561 - DNA, 21 bp, Homo sapiens
attgaaacctygtactctttg

SEQ ID NO: 20562 - DNA, 21 bp, Homo sapiens
tctgaaaaatrttgaaatttt

SEQ ID NO: 20563 - DNA, 21 bp, Homo sapiens
caagcatccaycctcctgtta

SEQ ID NO: 20564 - DNA, 21 bp, Homo sapiens
aaataaaataygtagcatttg

SEQ ID NO: 20565 - DNA, 21 bp, Homo sapiens
atagtggaagyagcaagtgat

SEQ ID NO: 20566 - DNA, 21 bp, Homo sapiens
ctaccctcaamttggagttcc

SEQ ID NO: 20567 - DNA, 21 bp, Homo sapiens
tgctcaatagkcatctgatga

SEQ ID NO: 20568 - DNA, 21 bp, Homo sapiens
ttcagcaagaycataatcaat

SEQ ID NO: 20569 - DNA, 21 bp, Homo sapiens
cacaagacttyagaatctaat

SEQ ID NO: 20570 - DNA, 21 bp, Homo sapiens
ccaaggaggaragatttttag

SEQ ID NO: 20571 - DNA, 21 bp, Homo sapiens
cacgacatctrggaagataat

SEQ ID NO: 20572 - DNA, 21 bp, Homo sapiens
acccacataaratgtagccat

SEQ ID NO: 20573 - DNA, 21 bp, Homo sapiens
tatatagagcrgggtaagggg

SEQ ID NO: 20574 - DNA, 21 bp, Homo sapiens
aaagagacccrcagatcagct

SEQ ID NO: 20575 - DNA, 21 bp, Homo sapiens
tgttttcctcytatctgtaat

SEQ ID NO: 20576 - DNA, 21 bp, Homo sapiens
gggtttacatktggacaaaga

SEQ ID NO: 20577 - DNA, 21 bp, Homo sapiens
tcattgcttckgttaccttct

SEQ ID NO: 20578 - DNA, 21 bp, Homo sapiens
aggaagaaaaygcaagaaaat

SEQ ID NO: 20579 - DNA, 21 bp, Homo sapiens
tagaggtgccrggctctggcc

SEQ ID NO: 20580 - DNA, 21 bp, Homo sapiens
taaaaagaaakctctagggcc

SEQ ID NO: 20581 - DNA, 21 bp, Homo sapiens
ccaagtaagcrtatggaagta

SEQ ID NO: 20582 - DNA, 21 bp, Homo sapiens
aacttctcttytccaccttgt

SEQ ID NO: 20583 - DNA, 21 bp, Homo sapiens
ctttttatttygttttaacct

SEQ ID NO: 20584 - DNA, 21 bp, Homo sapiens
gtggtgctgcrgagatggtcc

SEQ ID NO: 20585 - DNA, 21 bp, Homo sapiens
gcctctctgargctaaaatag

SEQ ID NO: 20586 - DNA, 21 bp, Homo sapiens
gtaaatgaaayttacctaaat

SEQ ID NO: 20587 - DNA, 21 bp, Homo sapiens
aagacagtttrtcatgatgtt

SEQ ID NO: 20588 - DNA, 21 bp, Homo sapiens
atttatctagytacattttgc

SEQ ID NO: 20589 - DNA, 21 bp, Homo sapiens
agaacttcccrtggagcacga

SEQ ID NO: 20590 - DNA, 21 bp, Homo sapiens
taccagccccrtctgacttgt

SEQ ID NO: 20591 - DNA, 21 bp, Homo sapiens
atggtagatarttcttaggcc

SEQ ID NO: 20592 - DNA, 21 bp, Homo sapiens
cttttatacartatcttatta

SEQ ID NO: 20593 - DNA, 21 bp, Homo sapiens
agaaagaatgytcctcttatg

SEQ ID NO: 20594 - DNA, 21 bp, Homo sapiens
acttaaaaccrccaatctaat

SEQ ID NO: 20595 - DNA, 21 bp, Homo sapiens
ttgatattackactgttctct

SEQ ID NO: 20596 - DNA, 21 bp, Homo sapiens
catgcatatcrtgggtttgga

SEQ ID NO: 20597 - DNA, 21 bp, Homo sapiens
tttgatttctrggacttttct

SEQ ID NO: 20598 - DNA, 21 bp, Homo sapiens
aagtgggacayaaagattagt

SEQ ID NO: 20599 - DNA, 21 bp, Homo sapiens
tgaccatattyggtggtctgc

SEQ ID NO: 20600 - DNA, 21 bp, Homo sapiens
ccatagaaagyggtaattaga

SEQ ID NO: 20601 - DNA, 21 bp, Homo sapiens
ctggaagttcrctgtgtataa

SEQ ID NO: 20602 - DNA, 21 bp, Homo sapiens
caatcactttrgaagattatt

SEQ ID NO: 20603 - DNA, 21 bp, Homo sapiens
aagttgaatayattagagcag

SEQ ID NO: 20604 - DNA, 21 bp, Homo sapiens
cccttcaccartattttggag

SEQ ID NO: 20605 - DNA, 21 bp, Homo sapiens
aaatataggtytgtgttttta

SEQ ID NO: 20606 - DNA, 21 bp, Homo sapiens
aacaactcaayacattctaaa

SEQ ID NO: 20607 - DNA, 21 bp, Homo sapiens
atgaagagtcyttcctcagct

SEQ ID NO: 20608 - DNA, 21 bp, Homo sapiens
tgttaccttayaaggcaaaag

SEQ ID NO: 20609 - DNA, 21 bp, Homo sapiens
cctgctctcaraccaccattt

SEQ ID NO: 20610 - DNA, 21 bp, Homo sapiens
tctcaaactcycaccaagttt

SEQ ID NO: 20611 - DNA, 21 bp, Homo sapiens
cctgagagagkcttagtattt

SEQ ID NO: 20612 - DNA, 21 bp, Homo sapiens
agttttttaayctgcatagct

SEQ ID NO: 20613 - DNA, 21 bp, Homo sapiens
gaaagagatgrtgataattag

SEQ ID NO: 20614 - DNA, 21 bp, Homo sapiens
catggttgacyacatcctaat

SEQ ID NO: 20615 - DNA, 21 bp, Homo sapiens
gtcttccacartgggccatta

SEQ ID NO: 20616 - DNA, 21 bp, Homo sapiens
ttcattcttcygctgtaatat

SEQ ID NO: 20617 - DNA, 21 bp, Homo sapiens
attctaacccrtactgtttct

SEQ ID NO: 20618 - DNA, 21 bp, Homo sapiens
tgcataaaagkaatgtgggca

SEQ ID NO: 20619 - DNA, 21 bp, Homo sapiens
tttttgagccrtgggagctat

SEQ ID NO: 20620 - DNA, 21 bp, Homo sapiens
ccctatagaayctgagaagct

SEQ ID NO: 20621 - DNA, 21 bp, Homo sapiens
taacaaaataycagtgttaac

SEQ ID NO: 20622 - DNA, 21 bp, Homo sapiens
aaagaaaagckttgtctcatt

SEQ ID NO: 20623 - DNA, 21 bp, Homo sapiens
ggaccaaattycaggtgattt

SEQ ID NO: 20624 - DNA, 21 bp, Homo sapiens
tgggggaaggraattttaaaa

SEQ ID NO: 20625 - DNA, 21 bp, Homo sapiens
aataaagtctrtaatcatgta

SEQ ID NO: 20626 - DNA, 21 bp, Homo sapiens
gggtagatagmgcaggagctg

SEQ ID NO: 20627 - DNA, 21 bp, Homo sapiens
ggaggcctggytgacacctgt

SEQ ID NO: 20628 - DNA, 21 bp, Homo sapiens
cccataaagaygaacctgttt

SEQ ID NO: 20629 - DNA, 21 bp, Homo sapiens
tggtctcattrcctttgactt

SEQ ID NO: 20630 - DNA, 21 bp, Homo sapiens
atcctagatgytgctctcttt

SEQ ID NO: 20631 - DNA, 21 bp, Homo sapiens
ggcactcttcytggtttgtag

SEQ ID NO: 20632 - DNA, 21 bp, Homo sapiens
aagtgcaagtytgtcacaaaa

SEQ ID NO: 20633 - DNA, 21 bp, Homo sapiens
acactgcttcrtttaaatttc

SEQ ID NO: 20634 - DNA, 21 bp, Homo sapiens
gagcctaggaragagtataga

SEQ ID NO: 20635 - DNA, 21 bp, Homo sapiens
gtatggttgtrtgacttgaga

SEQ ID NO: 20636 - DNA, 21 bp, Homo sapiens
gcttacagcarttgagataac

SEQ ID NO: 20637 - DNA, 21 bp, Homo sapiens
gattttccccygcgaaatgat

SEQ ID NO: 20638 - DNA, 21 bp, Homo sapiens
tttggggaaartggagggtgt

SEQ ID NO: 20639 - DNA, 21 bp, Homo sapiens
ttagatgtgtkacatagacaa

SEQ ID NO: 20640 - DNA, 21 bp, Homo sapiens
tattagttccrggcttgaatt

SEQ ID NO: 20641 - DNA, 21 bp, Homo sapiens
aattgaactaytgtaagtcag

SEQ ID NO: 20642 - DNA, 21 bp, Homo sapiens
tgaatttggargtaagagaca

SEQ ID NO: 20643 - DNA, 21 bp, Homo sapiens
tactgtatcartgtcaaaagg

SEQ ID NO: 20644 - DNA, 21 bp, Homo sapiens
tgttttctttrtgattcctgg

SEQ ID NO: 20645 - DNA, 21 bp, Homo sapiens
tgtgctgactycaggggtgtg

SEQ ID NO: 20646 - DNA, 21 bp, Homo sapiens
tagttcttttrtttgcatgca

SEQ ID NO: 20647 - DNA, 21 bp, Homo sapiens
cagggcagtgmtgagttccaa

SEQ ID NO: 20648 - DNA, 21 bp, Homo sapiens
atatcattggktctaagaggt

SEQ ID NO: 20649 - DNA, 21 bp, Homo sapiens
taagaggaatraacactcatt

SEQ ID NO: 20650 - DNA, 21 bp, Homo sapiens
gcctactatgyagaagttact

SEQ ID NO: 20651 - DNA, 21 bp, Homo sapiens
tgctgcagtgyccttggccag

SEQ ID NO: 20652 - DNA, 21 bp, Homo sapiens
tacttctctgkcctcttgact

SEQ ID NO: 20653 - DNA, 21 bp, Homo sapiens
tgtaggaagtrgagaacaaca

SEQ ID NO: 20654 - DNA, 21 bp, Homo sapiens
gcctgggaccrgtcatccttc

SEQ ID NO: 20655 - DNA, 21 bp, Homo sapiens
acacaaatgayagttggcgga

SEQ ID NO: 20656 - DNA, 21 bp, Homo sapiens
gttagtacttytattgcttct

SEQ ID NO: 20657 - DNA, 21 bp, Homo sapiens
aagaaataggyttagctgcat

SEQ ID NO: 20658 - DNA, 21 bp, Homo sapiens
ctcctgctttraccaaatatt

SEQ ID NO: 20659 - DNA, 21 bp, Homo sapiens
gaagttactcrcactctattt

SEQ ID NO: 20660 - DNA, 21 bp, Homo sapiens
gcttgcttgamccattcctcc

SEQ ID NO: 20661 - DNA, 21 bp, Homo sapiens
caggactgtgrttaaggggaa

SEQ ID NO: 20662 - DNA, 21 bp, Homo sapiens
catttaatgayattgagacaa

SEQ ID NO: 20663 - DNA, 21 bp, Homo sapiens
ctggtgactaygattaaaagg

SEQ ID NO: 20664 - DNA, 21 bp, Homo sapiens
ctggattattytgagttagaa

SEQ ID NO: 20665 - DNA, 21 bp, Homo sapiens
ttttaagagtrggaaattatc

SEQ ID NO: 20666 - DNA, 21 bp, Homo sapiens
tactcacccaycacacgttta

SEQ ID NO: 20667 - DNA, 21 bp, Homo sapiens
caggaccaccytcgagtcact

SEQ ID NO: 20668 - DNA, 21 bp, Homo sapiens
cagaaaagctytgttcaagtc

SEQ ID NO: 20669 - DNA, 21 bp, Homo sapiens
gttgtagagargggcacaaac

SEQ ID NO: 20670 - DNA, 21 bp, Homo sapiens
tctatacaggytaagcagagt

SEQ ID NO: 20671 - DNA, 21 bp, Homo sapiens
atgactcaacmctttgtgtgg

SEQ ID NO: 20672 - DNA, 21 bp, Homo sapiens
gactaggaggyagctctctta

SEQ ID NO: 20673 - DNA, 21 bp, Homo sapiens
cgaatataaamatgcgttaat

SEQ ID NO: 20674 - DNA, 21 bp, Homo sapiens
ctttaaatcaytataagtccc

SEQ ID NO: 20675 - DNA, 21 bp, Homo sapiens
gggggcatggmggaaacaaag

SEQ ID NO: 20676 - DNA, 21 bp, Homo sapiens
gaatgtggagrgtggggaatg

SEQ ID NO: 20677 - DNA, 21 bp, Homo sapiens
cctccaagctkccctcgttct

SEQ ID NO: 20678 - DNA, 21 bp, Homo sapiens
cagaaaaagtytgtgcttgcc

SEQ ID NO: 20679 - DNA, 21 bp, Homo sapiens
aagttgttttkgaagggaaca

SEQ ID NO: 20680 - DNA, 21 bp, Homo sapiens
aagatgattgkgttgggtggg

SEQ ID NO: 20681 - DNA, 21 bp, Homo sapiens
agccctacccyttgaaaggca

SEQ ID NO: 20682 - DNA, 21 bp, Homo sapiens
ttttgctttcrtcacttaaca

SEQ ID NO: 20683 - DNA, 21 bp, Homo sapiens
gtctgctctgmtgaccctctc

SEQ ID NO: 20684 - DNA, 21 bp, Homo sapiens
aaactataatyctgtgacttc

SEQ ID NO: 20685 - DNA, 21 bp, Homo sapiens
tacagcttcarccgggagctc

SEQ ID NO: 20686 - DNA, 21 bp, Homo sapiens
attttttttcygttgtaggac

SEQ ID NO: 20687 - DNA, 21 bp, Homo sapiens
acgggcacacrccgtccaagc

SEQ ID NO: 20688 - DNA, 21 bp, Homo sapiens
tggggaactayaaaagacaca

SEQ ID NO: 20689 - DNA, 21 bp, Homo sapiens
gctcttaaccrcagtgacact

SEQ ID NO: 20690 - DNA, 21 bp, Homo sapiens
gccctcctccrtatttgtgtc

SEQ ID NO: 20691 - DNA, 21 bp, Homo sapiens
cactgtgcttmgacccacgta

SEQ ID NO: 20692 - DNA, 21 bp, Homo sapiens
tggtataaaartataaaacac

SEQ ID NO: 20693 - DNA, 21 bp, Homo sapiens
caactccagcmaggatctgaa

SEQ ID NO: 20694 - DNA, 21 bp, Homo sapiens
aagtgggctamccccccatcc

SEQ ID NO: 20695 - DNA, 21 bp, Homo sapiens
acaaaccctcytactggcctt

SEQ ID NO: 20696 - DNA, 21 bp, Homo sapiens
cgagggaaacyctgggcatcg

SEQ ID NO: 20697 - DNA, 21 bp, Homo sapiens
atccaggttaygaaggtgttt

SEQ ID NO: 20698 - DNA, 21 bp, Homo sapiens
tgaccttctayagtacttgaa

SEQ ID NO: 20699 - DNA, 21 bp, Homo sapiens
tcctaacatcrttttaatatt

SEQ ID NO: 20700 - DNA, 21 bp, Homo sapiens
aatttccagartctctttgat

SEQ ID NO: 20701 - DNA, 21 bp, Homo sapiens
atctgctgtgrcaatactctg

SEQ ID NO: 20702 - DNA, 21 bp, Homo sapiens
tgcacatgctrcccctttacg

SEQ ID NO: 20703 - DNA, 21 bp, Homo sapiens
cattactcatytaattctcct

SEQ ID NO: 20704 - DNA, 21 bp, Homo sapiens
tttgtggaagraaagaaagac

SEQ ID NO: 20705 - DNA, 21 bp, Homo sapiens
gaatacaagamaaagaaataa

SEQ ID NO: 20706 - DNA, 21 bp, Homo sapiens
gcttcagcacrcttggcagca

SEQ ID NO: 20707 - DNA, 21 bp, Homo sapiens
aaaaagtaagraacaatctaa

SEQ ID NO: 20708 - DNA, 21 bp, Homo sapiens
attaaatattraaatacaagt

SEQ ID NO: 20709 - DNA, 21 bp, Homo sapiens
ggtctcatcaycttattaaga

SEQ ID NO: 20710 - DNA, 21 bp, Homo sapiens
aagcatggccrgcatgatttc

SEQ ID NO: 20711 - DNA, 21 bp, Homo sapiens
tagaggagaamgtacattcca

SEQ ID NO: 20712 - DNA, 21 bp, Homo sapiens
caatgaggaayagcctggcct

SEQ ID NO: 20713 - DNA, 21 bp, Homo sapiens
gaaatccaggmggtctgggag

SEQ ID NO: 20714 - DNA, 21 bp, Homo sapiens
tggcctcttaygtgcccattc

SEQ ID NO: 20715 - DNA, 21 bp, Homo sapiens
atttaaacccrcgtttccttt

SEQ ID NO: 20716 - DNA, 21 bp, Homo sapiens
ctctgcatggygttcaggtgg

SEQ ID NO: 20717 - DNA, 21 bp, Homo sapiens
cactgccaacrtttcattatg

SEQ ID NO: 20718 - DNA, 21 bp, Homo sapiens
cctgtccaacygggctgcaaa

SEQ ID NO: 20719 - DNA, 21 bp, Homo sapiens
attatcttcarttcctgcttc

SEQ ID NO: 20720 - DNA, 21 bp, Homo sapiens
tccaaacagcrtgtagtttaa

SEQ ID NO: 20721 - DNA, 21 bp, Homo sapiens
tgcagctgccrgatggaatag

SEQ ID NO: 20722 - DNA, 21 bp, Homo sapiens
atgggcttggkgtttggtgcc

SEQ ID NO: 20723 - DNA, 21 bp, Homo sapiens
gtgatgcggcytcctagtaca

SEQ ID NO: 20724 - DNA, 21 bp, Homo sapiens
gggaaatgtgkactagccatg

SEQ ID NO: 20725 - DNA, 21 bp, Homo sapiens
aatggcttagrgatgatcatg

SEQ ID NO: 20726 - DNA, 21 bp, Homo sapiens
tctggatgaayggacttgatg

SEQ ID NO: 20727 - DNA, 21 bp, Homo sapiens
ccgacccaacytctagaccct

SEQ ID NO: 20728 - DNA, 21 bp, Homo sapiens
atgtggtaccmaaaaatccag

SEQ ID NO: 20729 - DNA, 21 bp, Homo sapiens
accagcttcayggaggagcag

SEQ ID NO: 20730 - DNA, 21 bp, Homo sapiens
ccatcacctgrccttttcctg

SEQ ID NO: 20731 - DNA, 21 bp, Homo sapiens
agtggggaaaktgttctacag

SEQ ID NO: 20732 - DNA, 21 bp, Homo sapiens
ctgaattcatrgtttccctct

SEQ ID NO: 20733 - DNA, 21 bp, Homo sapiens
tcacaaatatmgtgtcctcac

SEQ ID NO: 20734 - DNA, 21 bp, Homo sapiens
agaaaggcctrtaaccaaatg

SEQ ID NO: 20735 - DNA, 21 bp, Homo sapiens
gttaatacgayggtatagaaa

SEQ ID NO: 20736 - DNA, 21 bp, Homo sapiens
acaaggtctcrggcatacgcc

SEQ ID NO: 20737 - DNA, 21 bp, Homo sapiens
gcctcctgccrtgtgaagagg

SEQ ID NO: 20738 - DNA, 21 bp, Homo sapiens
catatatcttyataataatga

SEQ ID NO: 20739 - DNA, 21 bp, Homo sapiens
gttgtggggakagggtcacat

SEQ ID NO: 20740 - DNA, 21 bp, Homo sapiens
cagtaagatayggccagaact

SEQ ID NO: 20741 - DNA, 21 bp, Homo sapiens
gcgctggccayccccatccct

SEQ ID NO: 20742 - DNA, 21 bp, Homo sapiens
gtcagcaggartgcgaggtgg

SEQ ID NO: 20743 - DNA, 21 bp, Homo sapiens
agtccacaccycccctccagg

SEQ ID NO: 20744 - DNA, 21 bp, Homo sapiens
gggctgcacakgcagctttga

SEQ ID NO: 20745 - DNA, 21 bp, Homo sapiens
caataggaccrgctgtgttct

SEQ ID NO: 20746 - DNA, 21 bp, Homo sapiens
tcatatgacaytgaataaact

SEQ ID NO: 20747 - DNA, 21 bp, Homo sapiens
ttcttgacccrgcaaggaaat

SEQ ID NO: 20748 - DNA, 21 bp, Homo sapiens
ttatgcaaatrtctgacacct

SEQ ID NO: 20749 - DNA, 21 bp, Homo sapiens
ctccttgcccycgcaaccatg

SEQ ID NO: 20750 - DNA, 21 bp, Homo sapiens
ctactttgcamatgtgtatac

SEQ ID NO: 20751 - DNA, 21 bp, Homo sapiens
tcttcaagcaytgagttgttt

SEQ ID NO: 20752 - DNA, 21 bp, Homo sapiens
ccaatcacatygttctgtggg

SEQ ID NO: 20753 - DNA, 21 bp, Homo sapiens
taagaaaagargggtatttct

SEQ ID NO: 20754 - DNA, 21 bp, Homo sapiens
aagggtggagmcttcaaaaat

SEQ ID NO: 20755 - DNA, 21 bp, Homo sapiens
aactgctattmatttctatgt

SEQ ID NO: 20756 - DNA, 21 bp, Homo sapiens
ctttttgctcrgttgaaaata

SEQ ID NO: 20757 - DNA, 21 bp, Homo sapiens
cagccttttgygaaacatcct

SEQ ID NO: 20758 - DNA, 21 bp, Homo sapiens
tttcatgtccrtatcccactt

SEQ ID NO: 20759 - DNA, 21 bp, Homo sapiens
tcactggatayatattttatg

SEQ ID NO: 20760 - DNA, 21 bp, Homo sapiens
tggaatcattmgtggtctgtt

SEQ ID NO: 20761 - DNA, 21 bp, Homo sapiens
tgtttctaccygccagattgc

SEQ ID NO: 20762 - DNA, 21 bp, Homo sapiens
cccataccacygctgtatcca

SEQ ID NO: 20763 - DNA, 21 bp, Homo sapiens
ttgcttgcttycttctctgat

SEQ ID NO: 20764 - DNA, 21 bp, Homo sapiens
tcaggagtcaraagtgaactt

SEQ ID NO: 20765 - DNA, 21 bp, Homo sapiens
cgagtctgcaktcagagagtc

SEQ ID NO: 20766 - DNA, 21 bp, Homo sapiens
gagaaaataartctgaaggtc

SEQ ID NO: 20767 - DNA, 21 bp, Homo sapiens
ctctgttgacrtcagttaatg

SEQ ID NO: 20768 - DNA, 21 bp, Homo sapiens
acttggttctkttgtccctct

SEQ ID NO: 20769 - DNA, 21 bp, Homo sapiens
gtgaggaaaargtaaagtgtt

SEQ ID NO: 20770 - DNA, 21 bp, Homo sapiens
agaaacgaaartgtcacatgg

SEQ ID NO: 20771 - DNA, 21 bp, Homo sapiens
ggcaacagggyctcctcaaat

SEQ ID NO: 20772 - DNA, 21 bp, Homo sapiens
actcatttgcygctacacagg

SEQ ID NO: 20773 - DNA, 21 bp, Homo sapiens
tagtagtataracatcagata

SEQ ID NO: 20774 - DNA, 21 bp, Homo sapiens
agaggatacarggcaagaaga

SEQ ID NO: 20775 - DNA, 21 bp, Homo sapiens
actttatgggrgttctcttac

SEQ ID NO: 20776 - DNA, 21 bp, Homo sapiens
agatacaggtrcctcatttgc

SEQ ID NO: 20777 - DNA, 21 bp, Homo sapiens
tacttacatcytccttgaggc

SEQ ID NO: 20778 - DNA, 21 bp, Homo sapiens
gagcacatctrcttgaaaccc

SEQ ID NO: 20779 - DNA, 21 bp, Homo sapiens
aatgaagtggrattttattca

SEQ ID NO: 20780 - DNA, 21 bp, Homo sapiens
tttgcaaatartaacccatga

SEQ ID NO: 20781 - DNA, 21 bp, Homo sapiens
cttaaattatytttggacata

SEQ ID NO: 20782 - DNA, 21 bp, Homo sapiens
cagtctgtctrtctttgtctc

SEQ ID NO: 20783 - DNA, 21 bp, Homo sapiens
gtagtgttgargagatgatga

SEQ ID NO: 20784 - DNA, 21 bp, Homo sapiens
tggaaaccatmtgctggttaa

SEQ ID NO: 20785 - DNA, 21 bp, Homo sapiens
tggcagactckgagcttgagt

SEQ ID NO: 20786 - DNA, 21 bp, Homo sapiens
ttggtagaacrtaagggtttt

SEQ ID NO: 20787 - DNA, 21 bp, Homo sapiens
taaatcaccartgaatacaaa

SEQ ID NO: 20788 - DNA, 21 bp, Homo sapiens
ctttcttggtkccatggctaa

SEQ ID NO: 20789 - DNA, 21 bp, Homo sapiens
gtagctcttcmatgctaagtg

SEQ ID NO: 20790 - DNA, 21 bp, Homo sapiens
ttgtaaggacyaagggtaata

SEQ ID NO: 20791 - DNA, 21 bp, Homo sapiens
ctcgaggattmcttgatattt

SEQ ID NO: 20792 - DNA, 21 bp, Homo sapiens
actgaatccayctttctttac

SEQ ID NO: 20793 - DNA, 21 bp, Homo sapiens
aagggtatgcraaaattcctc

SEQ ID NO: 20794 - DNA, 21 bp, Homo sapiens
tctatattttygatttagtat

SEQ ID NO: 20795 - DNA, 21 bp, Homo sapiens
gattcaaattmtcctcctacc

SEQ ID NO: 20796 - DNA, 21 bp, Homo sapiens
acattttcctycattttaaaa

SEQ ID NO: 20797 - DNA, 21 bp, Homo sapiens
aaataacagargcagggcaca

SEQ ID NO: 20798 - DNA, 21 bp, Homo sapiens
tttttttttcmcctctctggc

SEQ ID NO: 20799 - DNA, 21 bp, Homo sapiens
tggaacctttrttaaatctta

SEQ ID NO: 20800 - DNA, 21 bp, Homo sapiens
atgggtttttktgtctcaatt

SEQ ID NO: 20801 - DNA, 21 bp, Homo sapiens
ttccaccaggraagttcctta

SEQ ID NO: 20802 - DNA, 21 bp, Homo sapiens
aatttcctttygactggtaag

SEQ ID NO: 20803 - DNA, 21 bp, Homo sapiens
aatagcagackggggatgaca

SEQ ID NO: 20804 - DNA, 21 bp, Homo sapiens
tcataattgtkggcgggaatg

SEQ ID NO: 20805 - DNA, 21 bp, Homo sapiens
aaacttgtaayatatctgtct

SEQ ID NO: 20806 - DNA, 21 bp, Homo sapiens
ccctactctgyaattacgtat

SEQ ID NO: 20807 - DNA, 21 bp, Homo sapiens
gtgactcaacrtgctattttt

SEQ ID NO: 20808 - DNA, 21 bp, Homo sapiens
ttgattttctrgtttacacgg

SEQ ID NO: 20809 - DNA, 21 bp, Homo sapiens
taaagtagagkaaacaagaga

SEQ ID NO: 20810 - DNA, 21 bp, Homo sapiens
tgaaaatactytaatataatt

SEQ ID NO: 20811 - DNA, 21 bp, Homo sapiens
ctgaacccagktttgatacta

SEQ ID NO: 20812 - DNA, 21 bp, Homo sapiens
ggcttaacccrcacaggaata

SEQ ID NO: 20813 - DNA, 21 bp, Homo sapiens
tgaacatgccrtctatgccat

SEQ ID NO: 20814 - DNA, 21 bp, Homo sapiens
gtgctatgcamctttctaagc

SEQ ID NO: 20815 - DNA, 21 bp, Homo sapiens
tgttttgtttygttatggctg

SEQ ID NO: 20816 - DNA, 21 bp, Homo sapiens
aaagttggttytgtactatta

SEQ ID NO: 20817 - DNA, 21 bp, Homo sapiens
tagcatatgayagccctgatg

SEQ ID NO: 20818 - DNA, 21 bp, Homo sapiens
caaggttgagkggaaagaaag

SEQ ID NO: 20819 - DNA, 21 bp, Homo sapiens
tagcaaaaatygtaatatttt

SEQ ID NO: 20820 - DNA, 21 bp, Homo sapiens
tgggctaatayggggtcttat

SEQ ID NO: 20821 - DNA, 21 bp, Homo sapiens
aaaataagacrgtgtataagt

SEQ ID NO: 20822 - DNA, 21 bp, Homo sapiens
aaatgcttctycttcaaattg

SEQ ID NO: 20823 - DNA, 21 bp, Homo sapiens
aaaatataacmggtaatgaat

SEQ ID NO: 20824 - DNA, 21 bp, Homo sapiens
tttttaatgtyccatgttttt

SEQ ID NO: 20825 - DNA, 21 bp, Homo sapiens
gtcaattcagygagaagaaaa

SEQ ID NO: 20826 - DNA, 21 bp, Homo sapiens
ccctttccccrtcatcttccc

SEQ ID NO: 20827 - DNA, 21 bp, Homo sapiens
aagtgaaagcmcagtacctaa

SEQ ID NO: 20828 - DNA, 21 bp, Homo sapiens
ttgaccttctrtaagtactgc

SEQ ID NO: 20829 - DNA, 21 bp, Homo sapiens
acagtagtgayatagatttga

SEQ ID NO: 20830 - DNA, 21 bp, Homo sapiens
agtccttacakagactcaggc

SEQ ID NO: 20831 - DNA, 21 bp, Homo sapiens
acactcttgtrtgtgagggtg

SEQ ID NO: 20832 - DNA, 21 bp, Homo sapiens
ggaggtttgaygtacagacta

SEQ ID NO: 20833 - DNA, 21 bp, Homo sapiens
aaggatggtamctggcagagg

SEQ ID NO: 20834 - DNA, 21 bp, Homo sapiens
caaaaccgacytaggaaactc

SEQ ID NO: 20835 - DNA, 21 bp, Homo sapiens
tgtttcagttrcttgcatgtg

SEQ ID NO: 20836 - DNA, 21 bp, Homo sapiens
catccacagarccctgcccaa

SEQ ID NO: 20837 - DNA, 21 bp, Homo sapiens
agtggttattktgactctcca

SEQ ID NO: 20838 - DNA, 21 bp, Homo sapiens
ctttagagagygattgactgc

SEQ ID NO: 20839 - DNA, 21 bp, Homo sapiens
gaagtctgtgyctatctgctt

SEQ ID NO: 20840 - DNA, 21 bp, Homo sapiens
gaggtggggaygacgtgatcg

SEQ ID NO: 20841 - DNA, 21 bp, Homo sapiens
gtcatgagggygtgggattaa

SEQ ID NO: 20842 - DNA, 21 bp, Homo sapiens
agcagttcacycagtctccag

SEQ ID NO: 20843 - DNA, 21 bp, Homo sapiens
gatagtgcagrggacacatca

SEQ ID NO: 20844 - DNA, 21 bp, Homo sapiens
tcgctgagagmaggaaactaa

SEQ ID NO: 20845 - DNA, 21 bp, Homo sapiens
tttctttaaartgaacaataa

SEQ ID NO: 20846 - DNA, 21 bp, Homo sapiens
aggacaaacaygtaagctggg

SEQ ID NO: 20847 - DNA, 21 bp, Homo sapiens
aagagaaaagrtgacttcgga

SEQ ID NO: 20848 - DNA, 21 bp, Homo sapiens
aggccagatgrtgactggacc

SEQ ID NO: 20849 - DNA, 21 bp, Homo sapiens
gaaatttccayctggagccaa

SEQ ID NO: 20850 - DNA, 21 bp, Homo sapiens
acagcatgagrctgccatgtt

SEQ ID NO: 20851 - DNA, 21 bp, Homo sapiens
tgaatggcccrtaagcatatt

SEQ ID NO: 20852 - DNA, 21 bp, Homo sapiens
gaaaaacaacrgggaaaaata

SEQ ID NO: 20853 - DNA, 21 bp, Homo sapiens
tggtttgtcayttaaatatca

SEQ ID NO: 20854 - DNA, 21 bp, Homo sapiens
gatctcaatayggatgtgctt

SEQ ID NO: 20855 - DNA, 21 bp, Homo sapiens
gagagcataaraggggaaaac

SEQ ID NO: 20856 - DNA, 21 bp, Homo sapiens
ttccccatgcrtcttccacac

SEQ ID NO: 20857 - DNA, 21 bp, Homo sapiens
ggctcagaacyatggagatgt

SEQ ID NO: 20858 - DNA, 21 bp, Homo sapiens
actttccaagmcttaggctct

SEQ ID NO: 20859 - DNA, 21 bp, Homo sapiens
ctcctttatamtgccgattct

SEQ ID NO: 20860 - DNA, 21 bp, Homo sapiens
tttaaagtttyagggaacagt

SEQ ID NO: 20861 - DNA, 21 bp, Homo sapiens
tctgaaaaagyagatggtccg

SEQ ID NO: 20862 - DNA, 21 bp, Homo sapiens
atcctacatcracagggtttt

SEQ ID NO: 20863 - DNA, 21 bp, Homo sapiens
aaaaaggatgyatattctgct

SEQ ID NO: 20864 - DNA, 21 bp, Homo sapiens
tcatgggtcayagttttctgc

SEQ ID NO: 20865 - DNA, 21 bp, Homo sapiens
catactccacyttcagtgaaa

SEQ ID NO: 20866 - DNA, 21 bp, Homo sapiens
tgcgccttatytgcaagaaac

SEQ ID NO: 20867 - DNA, 21 bp, Homo sapiens
attttgattaygaagtttcaa

SEQ ID NO: 20868 - DNA, 21 bp, Homo sapiens
gggatttggtrgggtaaagga

SEQ ID NO: 20869 - DNA, 21 bp, Homo sapiens
atcccctcagytggcaggtac

SEQ ID NO: 20870 - DNA, 21 bp, Homo sapiens
ttgataggtayttattccttt

SEQ ID NO: 20871 - DNA, 21 bp, Homo sapiens
tgctagagacrctagacttca

SEQ ID NO: 20872 - DNA, 21 bp, Homo sapiens
ttatacaatgmtatgatagct

SEQ ID NO: 20873 - DNA, 21 bp, Homo sapiens
cgtgtaaacayggatatgata

SEQ ID NO: 20874 - DNA, 21 bp, Homo sapiens
acctgttcagractcatcttt

SEQ ID NO: 20875 - DNA, 21 bp, Homo sapiens
tgccgacgtcrggtgacttga

SEQ ID NO: 20876 - DNA, 21 bp, Homo sapiens
catgttaccaygtgcagatat

SEQ ID NO: 20877 - DNA, 21 bp, Homo sapiens
agtgcttcccrtggcttccag

SEQ ID NO: 20878 - DNA, 21 bp, Homo sapiens
ggttactgacracttagcaac

SEQ ID NO: 20879 - DNA, 21 bp, Homo sapiens
tcctctggtgygtgggttgct

SEQ ID NO: 20880 - DNA, 21 bp, Homo sapiens
cagagttcagycctaattggg

SEQ ID NO: 20881 - DNA, 21 bp, Homo sapiens
ttgtcctgtcycatacctgcc

SEQ ID NO: 20882 - DNA, 21 bp, Homo sapiens
catgaaagagyccagcaccac

SEQ ID NO: 20883 - DNA, 21 bp, Homo sapiens
gtgtctctccyattttatctg

SEQ ID NO: 20884 - DNA, 21 bp, Homo sapiens
gaaatgaaaayggaaatctcc

SEQ ID NO: 20885 - DNA, 21 bp, Homo sapiens
ttttatatttrtgatactgaa

SEQ ID NO: 20886 - DNA, 21 bp, Homo sapiens
tcccaaatccycctcacagct

SEQ ID NO: 20887 - DNA, 21 bp, Homo sapiens
cttgttgatcygctgagaagg

SEQ ID NO: 20888 - DNA, 21 bp, Homo sapiens
tgcatatggcktatgagtggc

SEQ ID NO: 20889 - DNA, 21 bp, Homo sapiens
actcaggagtygtgtgtgaga

SEQ ID NO: 20890 - DNA, 21 bp, Homo sapiens
ctctggcttgkcccgtcgttg

SEQ ID NO: 20891 - DNA, 21 bp, Homo sapiens
aagaaaacagraaagtggtta

SEQ ID NO: 20892 - DNA, 21 bp, Homo sapiens
agcctgcttarccactgtcga

SEQ ID NO: 20893 - DNA, 21 bp, Homo sapiens
ctaggcgcatygccaaagtca

SEQ ID NO: 20894 - DNA, 21 bp, Homo sapiens
gaaatcctccrctaagtggtg

SEQ ID NO: 20895 - DNA, 21 bp, Homo sapiens
ctggttgatayagtctttaaa

SEQ ID NO: 20896 - DNA, 21 bp, Homo sapiens
tagccttcagrccccaactcc

SEQ ID NO: 20897 - DNA, 21 bp, Homo sapiens
agaaatagctkctttcacgta

SEQ ID NO: 20898 - DNA, 21 bp, Homo sapiens
ttctgagagcrttggcagggc

SEQ ID NO: 20899 - DNA, 21 bp, Homo sapiens
gcaggggagcyaagtttctcc

SEQ ID NO: 20900 - DNA, 21 bp, Homo sapiens
gcaggtcgccyagccctccgt

SEQ ID NO: 20901 - DNA, 21 bp, Homo sapiens
ctgagacacaytgcaggaggc

SEQ ID NO: 20902 - DNA, 21 bp, Homo sapiens
tgagcctgcayagctgggagg

SEQ ID NO: 20903 - DNA, 21 bp, Homo sapiens
cctttgggccygagcatgact

SEQ ID NO: 20904 - DNA, 21 bp, Homo sapiens
cagctctgtgmagtcattcgg

SEQ ID NO: 20905 - DNA, 21 bp, Homo sapiens
gacttttcttyagaaacagaa

SEQ ID NO: 20906 - DNA, 21 bp, Homo sapiens
gaattaaaatktgggtcagct

SEQ ID NO: 20907 - DNA, 21 bp, Homo sapiens
aatactacggycaaatgaaat

SEQ ID NO: 20908 - DNA, 21 bp, Homo sapiens
ccgcgccgttyactttccagt

SEQ ID NO: 20909 - DNA, 21 bp, Homo sapiens
aaaaaaggttyaatgggtgac

SEQ ID NO: 20910 - DNA, 21 bp, Homo sapiens
attgctgatcrtctggggagt

SEQ ID NO: 20911 - DNA, 21 bp, Homo sapiens
acgtatgggtyttccttcatt

SEQ ID NO: 20912 - DNA, 21 bp, Homo sapiens
gagttaaggtyggtagccagc

SEQ ID NO: 20913 - DNA, 21 bp, Homo sapiens
cagagggacaragaatgcagg

SEQ ID NO: 20914 - DNA, 21 bp, Homo sapiens
gccaaggcacrcacacatgca

SEQ ID NO: 20915 - DNA, 21 bp, Homo sapiens
aaataacttcraaagatgtgg

SEQ ID NO: 20916 - DNA, 21 bp, Homo sapiens
gccagtgtccraggaaggctg

SEQ ID NO: 20917 - DNA, 21 bp, Homo sapiens
agagcctgtcyttattccagg

SEQ ID NO: 20918 - DNA, 21 bp, Homo sapiens
gtctctcaccrccgggccaca

SEQ ID NO: 20919 - DNA, 21 bp, Homo sapiens
cagcttcctcragagcacccc

SEQ ID NO: 20920 - DNA, 21 bp, Homo sapiens
cacactcttcytggattctag

SEQ ID NO: 20921 - DNA, 21 bp, Homo sapiens
aatggcagcarggttctcttt

SEQ ID NO: 20922 - DNA, 21 bp, Homo sapiens
tggtcgctgcygtttactttt

SEQ ID NO: 20923 - DNA, 21 bp, Homo sapiens
cactgcgaagrcttccccttc

SEQ ID NO: 20924 - DNA, 21 bp, Homo sapiens
caagagacccracccaggagg

SEQ ID NO: 20925 - DNA, 21 bp, Homo sapiens
atgaacaagamcagagggacc

SEQ ID NO: 20926 - DNA, 21 bp, Homo sapiens
ccgatgaggcrtttgagtctg

SEQ ID NO: 20927 - DNA, 21 bp, Homo sapiens
gcgctctcctyttcacttagg

SEQ ID NO: 20928 - DNA, 21 bp, Homo sapiens
acccccaccgrcccgcgaagc

SEQ ID NO: 20929 - DNA, 21 bp, Homo sapiens
ccgctccctgycctccattcc

SEQ ID NO: 20930 - DNA, 21 bp, Homo sapiens
ccttcgccgtkccggctccag

SEQ ID NO: 20931 - DNA, 21 bp, Homo sapiens
agcctccagtrccaggtccct

SEQ ID NO: 20932 - DNA, 21 bp, Homo sapiens
gctgaaggttyctctcccgga

SEQ ID NO: 20933 - DNA, 21 bp, Homo sapiens
cgggccctccrtgtgtccatt

SEQ ID NO: 20934 - DNA, 21 bp, Homo sapiens
agccggggatrcatcaggtga

SEQ ID NO: 20935 - DNA, 21 bp, Homo sapiens
cttaccagggygttcctgttc

SEQ ID NO: 20936 - DNA, 21 bp, Homo sapiens
ggggctgactytttctcctgg

SEQ ID NO: 20937 - DNA, 21 bp, Homo sapiens
ccagcggtggmccccgcagca

SEQ ID NO: 20938 - DNA, 21 bp, Homo sapiens
tgagaggcttytctgcctccc

SEQ ID NO: 20939 - DNA, 21 bp, Homo sapiens
agcccacgtcrcccacacccc

SEQ ID NO: 20940 - DNA, 21 bp, Homo sapiens
gacacaagagmtaccttctat

SEQ ID NO: 20941 - DNA, 21 bp, Homo sapiens
gacacagttcracagcagtag

SEQ ID NO: 20942 - DNA, 21 bp, Homo sapiens
tctggtcctcygctttctcac

SEQ ID NO: 20943 - DNA, 21 bp, Homo sapiens
tgaatcgtacrttgtggaagc

SEQ ID NO: 20944 - DNA, 21 bp, Homo sapiens
gaaccatggcmcattgagaca

SEQ ID NO: 20945 - DNA, 21 bp, Homo sapiens
ccgatctcttygagggacttc

SEQ ID NO: 20946 - DNA, 21 bp, Homo sapiens
ctagggcagcragttgtccca

SEQ ID NO: 20947 - DNA, 21 bp, Homo sapiens
ttcactatcargaagtccctt

SEQ ID NO: 20948 - DNA, 21 bp, Homo sapiens
tggactgcacyttgtaggtct

SEQ ID NO: 20949 - DNA, 21 bp, Homo sapiens
ccttgtaaagyaactggaatg

SEQ ID NO: 20950 - DNA, 21 bp, Homo sapiens
atatttctttyggtgtagaca

SEQ ID NO: 20951 - DNA, 21 bp, Homo sapiens
tctatcttgcygtctgctctg

SEQ ID NO: 20952 - DNA, 21 bp, Homo sapiens
caggacatagmcaaggttacg

SEQ ID NO: 20953 - DNA, 21 bp, Homo sapiens
ggtctctgtgkagggaaaatc

SEQ ID NO: 20954 - DNA, 21 bp, Homo sapiens
tcaactcactrgtttactatt

SEQ ID NO: 20955 - DNA, 21 bp, Homo sapiens
ctccagctgtmtggctgtctc

SEQ ID NO: 20956 - DNA, 21 bp, Homo sapiens
gcatgtgtggrgtttgatctc

SEQ ID NO: 20957 - DNA, 21 bp, Homo sapiens
gctctctcccygccttctagc

SEQ ID NO: 20958 - DNA, 21 bp, Homo sapiens
tttaatttatygctgcacaaa

SEQ ID NO: 20959 - DNA, 21 bp, Homo sapiens
ttcctcacaamttatcttaat

SEQ ID NO: 20960 - DNA, 21 bp, Homo sapiens
attagactcakcgcgatcatc

SEQ ID NO: 20961 - DNA, 21 bp, Homo sapiens
ccctctccccmctcagggctg

SEQ ID NO: 20962 - DNA, 21 bp, Homo sapiens
tctttattccyttcctatctc

SEQ ID NO: 20963 - DNA, 21 bp, Homo sapiens
cttacgccctrcctggtttca

SEQ ID NO: 20964 - DNA, 21 bp, Homo sapiens
gtcatttgaamgccctgtgaa

SEQ ID NO: 20965 - DNA, 21 bp, Homo sapiens
agaaaatgtaygcatatacca

SEQ ID NO: 20966 - DNA, 21 bp, Homo sapiens
acaggattctrtgtccatccc

SEQ ID NO: 20967 - DNA, 21 bp, Homo sapiens
tgggtctcaarcaatgagaag

SEQ ID NO: 20968 - DNA, 21 bp, Homo sapiens
gtggcaaaagmgtggctgacc

SEQ ID NO: 20969 - DNA, 21 bp, Homo sapiens
accatggtggktatttctctc

SEQ ID NO: 20970 - DNA, 21 bp, Homo sapiens
ccatccttgaygatccttcca

SEQ ID NO: 20971 - DNA, 21 bp, Homo sapiens
cctataatacyttataatcct

SEQ ID NO: 20972 - DNA, 21 bp, Homo sapiens
gggagccaggmgcatcaggga

SEQ ID NO: 20973 - DNA, 21 bp, Homo sapiens
agtcattattytaaggccttt

SEQ ID NO: 20974 - DNA, 21 bp, Homo sapiens
gatgatttctkattcccttaa

SEQ ID NO: 20975 - DNA, 21 bp, Homo sapiens
tcttttgtttrctctactgga

SEQ ID NO: 20976 - DNA, 21 bp, Homo sapiens
gaaaggacatkcagacttgaa

SEQ ID NO: 20977 - DNA, 21 bp, Homo sapiens
gttttgctggytatggaagtt

SEQ ID NO: 20978 - DNA, 21 bp, Homo sapiens
agtccctgggrtatttcctaa

SEQ ID NO: 20979 - DNA, 21 bp, Homo sapiens
agccctgttayaagggatcaa

SEQ ID NO: 20980 - DNA, 21 bp, Homo sapiens
attcttactgkctgaagcagc

SEQ ID NO: 20981 - DNA, 21 bp, Homo sapiens
agagcccaccrtgatgacagc

SEQ ID NO: 20982 - DNA, 21 bp, Homo sapiens
atccatccttycatgtatctg

SEQ ID NO: 20983 - DNA, 21 bp, Homo sapiens
tgagtcttggygtcacaggga

SEQ ID NO: 20984 - DNA, 21 bp, Homo sapiens
ccactttgccrataaggaaat

SEQ ID NO: 20985 - DNA, 21 bp, Homo sapiens
aagtaagaccrcaagagctgg

SEQ ID NO: 20986 - DNA, 21 bp, Homo sapiens
gtaacacatcrtttaatgaat

SEQ ID NO: 20987 - DNA, 21 bp, Homo sapiens
agaattctctktggtggacaa

SEQ ID NO: 20988 - DNA, 21 bp, Homo sapiens
acatgaacacrtagcaccaac

SEQ ID NO: 20989 - DNA, 21 bp, Homo sapiens
aggaattgggrcaagggttgg

SEQ ID NO: 20990 - DNA, 21 bp, Homo sapiens
tttgatctacracatgatgag

SEQ ID NO: 20991 - DNA, 21 bp, Homo sapiens
caggaagcagrgaatctttaa

SEQ ID NO: 20992 - DNA, 21 bp, Homo sapiens
cccattgtttytgagagtgag

SEQ ID NO: 20993 - DNA, 21 bp, Homo sapiens
gaaacgacacyattttctgtt

SEQ ID NO: 20994 - DNA, 21 bp, Homo sapiens
ttcaggacgaygtgaaagaac

SEQ ID NO: 20995 - DNA, 21 bp, Homo sapiens
taaagccctgraagtctggct

SEQ ID NO: 20996 - DNA, 21 bp, Homo sapiens
ttgtcaacatrtcttgtcctc

SEQ ID NO: 20997 - DNA, 21 bp, Homo sapiens
gagacccgagrcagaagtatc

SEQ ID NO: 20998 - DNA, 21 bp, Homo sapiens
gaccaacagargctattatga

SEQ ID NO: 20999 - DNA, 21 bp, Homo sapiens
aaggatattgygttctagcac

SEQ ID NO: 21000 - DNA, 21 bp, Homo sapiens
aaataggtatraatttttcaa

SEQ ID NO: 21001 - DNA, 21 bp, Homo sapiens
actctttcccygttaactgct

SEQ ID NO: 21002 - DNA, 21 bp, Homo sapiens
atttttctcarcttttttttt

SEQ ID NO: 21003 - DNA, 21 bp, Homo sapiens
tcaccctttayattgccttgc

SEQ ID NO: 21004 - DNA, 21 bp, Homo sapiens
ttccctttctrgcatatcagc

SEQ ID NO: 21005 - DNA, 21 bp, Homo sapiens
taacacttctktggagaggcc

SEQ ID NO: 21006 - DNA, 21 bp, Homo sapiens
caatagtgaaygatctgaaaa

SEQ ID NO: 21007 - DNA, 21 bp, Homo sapiens
gctagtgataygacaaggcat

SEQ ID NO: 21008 - DNA, 21 bp, Homo sapiens
aaaaccctgcygctaagtaaa

SEQ ID NO: 21009 - DNA, 21 bp, Homo sapiens
tttcttcattrtatttattat

SEQ ID NO: 21010 - DNA, 21 bp, Homo sapiens
taaaatcgtcraatgatgcta

SEQ ID NO: 21011 - DNA, 21 bp, Homo sapiens
ctcctcacatkgaacttctat

SEQ ID NO: 21012 - DNA, 21 bp, Homo sapiens
acacagactgytcccttctct

SEQ ID NO: 21013 - DNA, 21 bp, Homo sapiens
gtaacagcagrctcaccaggg

SEQ ID NO: 21014 - DNA, 21 bp, Homo sapiens
aacattggcakgctttgccat

SEQ ID NO: 21015 - DNA, 21 bp, Homo sapiens
gcagtaggagyccatggacct

SEQ ID NO: 21016 - DNA, 21 bp, Homo sapiens
catttattcaygcgtcacaca

SEQ ID NO: 21017 - DNA, 21 bp, Homo sapiens
agagtcccaayaaatcctccc

SEQ ID NO: 21018 - DNA, 21 bp, Homo sapiens
tatctcagcakggggctttcc

SEQ ID NO: 21019 - DNA, 21 bp, Homo sapiens
cttatgctcartgggtagagg

SEQ ID NO: 21020 - DNA, 21 bp, Homo sapiens
gcatactcagrgtaaaagtaa

SEQ ID NO: 21021 - DNA, 21 bp, Homo sapiens
gttctgaccaygggagcctat

SEQ ID NO: 21022 - DNA, 21 bp, Homo sapiens
ggttggtccartgtcatattc

SEQ ID NO: 21023 - DNA, 21 bp, Homo sapiens
tcaaacatacrgaaacatgga

SEQ ID NO: 21024 - DNA, 21 bp, Homo sapiens
ggtctcctacratcatatagc

SEQ ID NO: 21025 - DNA, 21 bp, Homo sapiens
agatcttgatktgagttcttg

SEQ ID NO: 21026 - DNA, 21 bp, Homo sapiens
acaagtggttraggattttga

SEQ ID NO: 21027 - DNA, 21 bp, Homo sapiens
gtatcagaatygcctggagca

SEQ ID NO: 21028 - DNA, 21 bp, Homo sapiens
tgccacactcrcctaacaggg

SEQ ID NO: 21029 - DNA, 21 bp, Homo sapiens
ttccatttcgyttgaaaccac

SEQ ID NO: 21030 - DNA, 21 bp, Homo sapiens
acaaaagtttrgcattttctt

SEQ ID NO: 21031 - DNA, 21 bp, Homo sapiens
ccagacctcayagaaactgca

SEQ ID NO: 21032 - DNA, 21 bp, Homo sapiens
tttaatggagyacttagaacc

SEQ ID NO: 21033 - DNA, 21 bp, Homo sapiens
tcatggcaagragatcactgg

SEQ ID NO: 21034 - DNA, 21 bp, Homo sapiens
aaacctgggargcaatagcac

SEQ ID NO: 21035 - DNA, 21 bp, Homo sapiens
tttccatcctytcaaaataac

SEQ ID NO: 21036 - DNA, 21 bp, Homo sapiens
ctgtggtttgrgcttcgtatc

SEQ ID NO: 21037 - DNA, 21 bp, Homo sapiens
tccatggccartggatttaaa

SEQ ID NO: 21038 - DNA, 21 bp, Homo sapiens
tgaaatatggytacctttctt

SEQ ID NO: 21039 - DNA, 21 bp, Homo sapiens
aaaccagcacyaggtaatgtt

SEQ ID NO: 21040 - DNA, 21 bp, Homo sapiens
ttcatacttcrgttgtttttg

SEQ ID NO: 21041 - DNA, 21 bp, Homo sapiens
tgcgtatattygttgcagcac

SEQ ID NO: 21042 - DNA, 21 bp, Homo sapiens
taggtgctccrtaaagattta

SEQ ID NO: 21043 - DNA, 21 bp, Homo sapiens
tctgctattgyctctctgcca

SEQ ID NO: 21044 - DNA, 21 bp, Homo sapiens
gtgcatggctmccttttctag

SEQ ID NO: 21045 - DNA, 21 bp, Homo sapiens
actattaccargttgcacctt

SEQ ID NO: 21046 - DNA, 21 bp, Homo sapiens
gtacaagtacrcttggtcaga

SEQ ID NO: 21047 - DNA, 21 bp, Homo sapiens
gcactcctagygtcctggctc

SEQ ID NO: 21048 - DNA, 21 bp, Homo sapiens
gaagactagtyacacagaaag

SEQ ID NO: 21049 - DNA, 21 bp, Homo sapiens
gtgtttttaaycagtacaagg

SEQ ID NO: 21050 - DNA, 21 bp, Homo sapiens
tttgaacctcmatttctttat

SEQ ID NO: 21051 - DNA, 21 bp, Homo sapiens
atgaataacaytggcactctt

SEQ ID NO: 21052 - DNA, 21 bp, Homo sapiens
gtgaacaacgrgttattgcaa

SEQ ID NO: 21053 - DNA, 21 bp, Homo sapiens
gatgggagccrgtgaagagga

SEQ ID NO: 21054 - DNA, 21 bp, Homo sapiens
aaagccagggyccactgggca

SEQ ID NO: 21055 - DNA, 21 bp, Homo sapiens
ggatgttaacrtgtgaaaata

SEQ ID NO: 21056 - DNA, 21 bp, Homo sapiens
agatgagtggrcattgaagca

SEQ ID NO: 21057 - DNA, 21 bp, Homo sapiens
ggtgaggctaytagatgttcg

SEQ ID NO: 21058 - DNA, 21 bp, Homo sapiens
tcccatttagrtagggtattg

SEQ ID NO: 21059 - DNA, 21 bp, Homo sapiens
ggatagaagckctctgcaact

SEQ ID NO: 21060 - DNA, 21 bp, Homo sapiens
taaccaaatcrcctactgata

SEQ ID NO: 21061 - DNA, 21 bp, Homo sapiens
gaaactcaacygcggaagctt

SEQ ID NO: 21062 - DNA, 21 bp, Homo sapiens
ggatattgtakgctttttttt

SEQ ID NO: 21063 - DNA, 21 bp, Homo sapiens
agctctgtctkcatggaggcg

SEQ ID NO: 21064 - DNA, 21 bp, Homo sapiens
ggagctgtgcraagggcatac

SEQ ID NO: 21065 - DNA, 21 bp, Homo sapiens
tctgatggctrtcacaaggac

SEQ ID NO: 21066 - DNA, 21 bp, Homo sapiens
actacccatgrcctttctgta

SEQ ID NO: 21067 - DNA, 21 bp, Homo sapiens
aggccacagayaatcccagcc

SEQ ID NO: 21068 - DNA, 21 bp, Homo sapiens
cagtagctgaygtgtccattt

SEQ ID NO: 21069 - DNA, 21 bp, Homo sapiens
atttttttttyctgctggttt

SEQ ID NO: 21070 - DNA, 21 bp, Homo sapiens
agctccctgamatattcctca

SEQ ID NO: 21071 - DNA, 21 bp, Homo sapiens
ctccctaacarctctatttaa

SEQ ID NO: 21072 - DNA, 21 bp, Homo sapiens
taatcctgtgyctattgttac

SEQ ID NO: 21073 - DNA, 21 bp, Homo sapiens
aaggttctccrctctatctga

SEQ ID NO: 21074 - DNA, 21 bp, Homo sapiens
aaatgtatagratgaacattc

SEQ ID NO: 21075 - DNA, 21 bp, Homo sapiens
tgtgatcctcygaacagcagt

SEQ ID NO: 21076 - DNA, 21 bp, Homo sapiens
ttgaggctgamggggaagggc

SEQ ID NO: 21077 - DNA, 21 bp, Homo sapiens
cctggtaagcytgggcattgg

SEQ ID NO: 21078 - DNA, 21 bp, Homo sapiens
tgcattttacmaggttaagta

SEQ ID NO: 21079 - DNA, 21 bp, Homo sapiens
aaagactggcrcataattttt

SEQ ID NO: 21080 - DNA, 21 bp, Homo sapiens
ggaaggagagrgtgagcaaat

SEQ ID NO: 21081 - DNA, 21 bp, Homo sapiens
cgaattgtccraggttccccc

SEQ ID NO: 21082 - DNA, 21 bp, Homo sapiens
ttccaagaagycgttctctaa

SEQ ID NO: 21083 - DNA, 21 bp, Homo sapiens
ggaaagtagtrtacataatat

SEQ ID NO: 21084 - DNA, 21 bp, Homo sapiens
actgcctcagygccagatgac

SEQ ID NO: 21085 - DNA, 21 bp, Homo sapiens
actgtgtccgkgtggaaaatg

SEQ ID NO: 21086 - DNA, 21 bp, Homo sapiens
gtgaggatgtmtctcctgtat

SEQ ID NO: 21087 - DNA, 21 bp, Homo sapiens
agttagtccaytcattccctc

SEQ ID NO: 21088 - DNA, 21 bp, Homo sapiens
agaaaaaaaarcttgtgttca

SEQ ID NO: 21089 - DNA, 21 bp, Homo sapiens
gtttctcctckgcttaaaacc

SEQ ID NO: 21090 - DNA, 21 bp, Homo sapiens
gcaattccaayggacaagaaa

SEQ ID NO: 21091 - DNA, 21 bp, Homo sapiens
atcaaccctgrggaatcttct

SEQ ID NO: 21092 - DNA, 21 bp, Homo sapiens
aattctcgagrcaaagcccag

SEQ ID NO: 21093 - DNA, 21 bp, Homo sapiens
actgaaatagrataattcaca

SEQ ID NO: 21094 - DNA, 21 bp, Homo sapiens
caggttgctgytactcacagt

SEQ ID NO: 21095 - DNA, 21 bp, Homo sapiens
ccaggatcttrcaaaagtctc

SEQ ID NO: 21096 - DNA, 21 bp, Homo sapiens
tctcagccagyccccctacat

SEQ ID NO: 21097 - DNA, 21 bp, Homo sapiens
gagtctacctrtgataacaat

SEQ ID NO: 21098 - DNA, 21 bp, Homo sapiens
gtcaagaggarataggaagca

SEQ ID NO: 21099 - DNA, 21 bp, Homo sapiens
ttccagcaaartgagccttgt

SEQ ID NO: 21100 - DNA, 21 bp, Homo sapiens
accatgagaarcaagatataa

SEQ ID NO: 21101 - DNA, 21 bp, Homo sapiens
ggtcctcaagyaggtacaact

SEQ ID NO: 21102 - DNA, 21 bp, Homo sapiens
cgggttgggcmacacttccag

SEQ ID NO: 21103 - DNA, 21 bp, Homo sapiens
aacccaaatgkaacccaacat

SEQ ID NO: 21104 - DNA, 21 bp, Homo sapiens
cagacccatartggaacacaa

SEQ ID NO: 21105 - DNA, 21 bp, Homo sapiens
acaaagtaaartttcctttta

SEQ ID NO: 21106 - DNA, 21 bp, Homo sapiens
tgtgttgctcyctgtcacttg

SEQ ID NO: 21107 - DNA, 21 bp, Homo sapiens
ttctatcttaycttcgtgcct

SEQ ID NO: 21108 - DNA, 21 bp, Homo sapiens
catgcattaakttgtgctggg

SEQ ID NO: 21109 - DNA, 21 bp, Homo sapiens
aggaatatagyaatatttggc

SEQ ID NO: 21110 - DNA, 21 bp, Homo sapiens
aagaaaggcayttattgcagg

SEQ ID NO: 21111 - DNA, 21 bp, Homo sapiens
tcccacttctycccgtgtatt

SEQ ID NO: 21112 - DNA, 21 bp, Homo sapiens
cagagcatacrttaatatacc

SEQ ID NO: 21113 - DNA, 21 bp, Homo sapiens
actttctcctratgagcctgg

SEQ ID NO: 21114 - DNA, 21 bp, Homo sapiens
cacgtgttcarctaaacctgg

SEQ ID NO: 21115 - DNA, 21 bp, Homo sapiens
ccactcaactrgtattcacta

SEQ ID NO: 21116 - DNA, 21 bp, Homo sapiens
acaattatctrctcttaacgc

SEQ ID NO: 21117 - DNA, 21 bp, Homo sapiens
caatggaaggmaccagctgca

SEQ ID NO: 21118 - DNA, 21 bp, Homo sapiens
catgattaaaygattgatttg

SEQ ID NO: 21119 - DNA, 21 bp, Homo sapiens
atgtttccaaygctggtacta

SEQ ID NO: 21120 - DNA, 21 bp, Homo sapiens
agcccttggayatatgacatt

SEQ ID NO: 21121 - DNA, 21 bp, Homo sapiens
gccctttaccrtggtctgcaa

SEQ ID NO: 21122 - DNA, 21 bp, Homo sapiens
tttctattttkgtctcaagaa

SEQ ID NO: 21123 - DNA, 21 bp, Homo sapiens
aaccagaacamatgcatcaga

SEQ ID NO: 21124 - DNA, 21 bp, Homo sapiens
ctgaccaagcrtatcatttta

SEQ ID NO: 21125 - DNA, 21 bp, Homo sapiens
gggaaaaattygtttattaga

SEQ ID NO: 21126 - DNA, 21 bp, Homo sapiens
atgtctcaccrcattggctgt

SEQ ID NO: 21127 - DNA, 21 bp, Homo sapiens
cctaaagccaygtaaattact

SEQ ID NO: 21128 - DNA, 21 bp, Homo sapiens
gagctgatgcygataaaggaa

SEQ ID NO: 21129 - DNA, 21 bp, Homo sapiens
ttgaaggccaycaagtcggcg

SEQ ID NO: 21130 - DNA, 21 bp, Homo sapiens
taaaaaaaatytacgctgcca

SEQ ID NO: 21131 - DNA, 21 bp, Homo sapiens
ttcatcttttmatacattcat

SEQ ID NO: 21132 - DNA, 21 bp, Homo sapiens
agtctgtgtgrcccctatcct

SEQ ID NO: 21133 - DNA, 21 bp, Homo sapiens
tgccccagcaktggtgtgtga

SEQ ID NO: 21134 - DNA, 21 bp, Homo sapiens
atacttttcamaagcatcctt

SEQ ID NO: 21135 - DNA, 21 bp, Homo sapiens
gcatgccatckgcttcctggt

SEQ ID NO: 21136 - DNA, 21 bp, Homo sapiens
atattgaaccygtttatattg

SEQ ID NO: 21137 - DNA, 21 bp, Homo sapiens
cttctgacctyagtgaacaca

SEQ ID NO: 21138 - DNA, 21 bp, Homo sapiens
atctattgtamgttctggttc

SEQ ID NO: 21139 - DNA, 21 bp, Homo sapiens
gctggctaggrtgttgtaaaa

SEQ ID NO: 21140 - DNA, 21 bp, Homo sapiens
aatacaagacrtaatattgac

SEQ ID NO: 21141 - DNA, 21 bp, Homo sapiens
tttcagtctcrccacaacatg

SEQ ID NO: 21142 - DNA, 21 bp, Homo sapiens
gcttctcgggrcaaaaataaa

SEQ ID NO: 21143 - DNA, 21 bp, Homo sapiens
aaacataaaarttaggcctga

SEQ ID NO: 21144 - DNA, 21 bp, Homo sapiens
ataggagggamaaacgagtac

SEQ ID NO: 21145 - DNA, 21 bp, Homo sapiens
ttagccttcartgaattattg

SEQ ID NO: 21146 - DNA, 21 bp, Homo sapiens
aaaactgcaakctctggctgt

SEQ ID NO: 21147 - DNA, 21 bp, Homo sapiens
agtataatgcyggctgtgggt

SEQ ID NO: 21148 - DNA, 21 bp, Homo sapiens
tggggaatcaytgcaggatac

SEQ ID NO: 21149 - DNA, 21 bp, Homo sapiens
caagtgaagamagctacatat

SEQ ID NO: 21150 - DNA, 21 bp, Homo sapiens
acttcagctgytcactatgtt

SEQ ID NO: 21151 - DNA, 21 bp, Homo sapiens
aagcgtgggayaggagacttg

SEQ ID NO: 21152 - DNA, 21 bp, Homo sapiens
atagtgtagtkaatattagca

SEQ ID NO: 21153 - DNA, 21 bp, Homo sapiens
aaccgctcctkttcttgtctc

SEQ ID NO: 21154 - DNA, 21 bp, Homo sapiens
cacacacacaycctatggcta

SEQ ID NO: 21155 - DNA, 21 bp, Homo sapiens
actactttgamaacaggagcc

SEQ ID NO: 21156 - DNA, 21 bp, Homo sapiens
ttcaaaaatgyatctagccaa

SEQ ID NO: 21157 - DNA, 21 bp, Homo sapiens
ctaattagtgmttaactactt

SEQ ID NO: 21158 - DNA, 21 bp, Homo sapiens
taaggaaagcraggaaacgga

SEQ ID NO: 21159 - DNA, 21 bp, Homo sapiens
agaaagaaaaytaaaaataaa

SEQ ID NO: 21160 - DNA, 21 bp, Homo sapiens
cagctgctaamccctgcaaat

SEQ ID NO: 21161 - DNA, 21 bp, Homo sapiens
cctaaaaatakaccgactgct

SEQ ID NO: 21162 - DNA, 21 bp, Homo sapiens
tgtagtcctcrttcaaaaaag

SEQ ID NO: 21163 - DNA, 21 bp, Homo sapiens
aggaaaaaaamcggatcaatt

SEQ ID NO: 21164 - DNA, 21 bp, Homo sapiens
tcagccatcargatcccccaa

SEQ ID NO: 21165 - DNA, 21 bp, Homo sapiens
ttgtctttgtmggaagtcttg

SEQ ID NO: 21166 - DNA, 21 bp, Homo sapiens
cgtatttttcmcatccttcca

SEQ ID NO: 21167 - DNA, 21 bp, Homo sapiens
gaggtatgggyagcacttaga

SEQ ID NO: 21168 - DNA, 21 bp, Homo sapiens
gccatgaattmttctgtctgc

SEQ ID NO: 21169 - DNA, 21 bp, Homo sapiens
atgcatgccamccggggaccc

SEQ ID NO: 21170 - DNA, 21 bp, Homo sapiens
ttccggttccrctaagactct

SEQ ID NO: 21171 - DNA, 21 bp, Homo sapiens
aaatcacagcrgtcactgagg

SEQ ID NO: 21172 - DNA, 21 bp, Homo sapiens
tctgctccttyctctgcaggt

SEQ ID NO: 21173 - DNA, 21 bp, Homo sapiens
cgtctcctacyccagcctgat

SEQ ID NO: 21174 - DNA, 21 bp, Homo sapiens
taaatgggggragtggccggg

SEQ ID NO: 21175 - DNA, 21 bp, Homo sapiens
agtacagccayttcaaaaaaa

SEQ ID NO: 21176 - DNA, 21 bp, Homo sapiens
gaatcactgcrtgccatgaaa

SEQ ID NO: 21177 - DNA, 21 bp, Homo sapiens
ccaaaccgcartcttttcaaa

SEQ ID NO: 21178 - DNA, 21 bp, Homo sapiens
tccaactccaygaggatggca

SEQ ID NO: 21179 - DNA, 21 bp, Homo sapiens
ggtgtgccccytggttttcca

SEQ ID NO: 21180 - DNA, 21 bp, Homo sapiens
tgctcattctrtcaggggctg

SEQ ID NO: 21181 - DNA, 21 bp, Homo sapiens
tctttactccmtttctacttg

SEQ ID NO: 21182 - DNA, 21 bp, Homo sapiens
tttcctggaarttcacccaat

SEQ ID NO: 21183 - DNA, 21 bp, Homo sapiens
attgggctccyataactgttc

SEQ ID NO: 21184 - DNA, 21 bp, Homo sapiens
tccaacatttytcgtcactct

SEQ ID NO: 21185 - DNA, 21 bp, Homo sapiens
ttgatcagacraacaaataaa

SEQ ID NO: 21186 - DNA, 21 bp, Homo sapiens
tggtggcctcygaggaagaac

SEQ ID NO: 21187 - DNA, 21 bp, Homo sapiens
gaaatgcaccratctccatcc

SEQ ID NO: 21188 - DNA, 21 bp, Homo sapiens
tacctgccgcycggaacgcca

SEQ ID NO: 21189 - DNA, 21 bp, Homo sapiens
ttacacaagayggaagatgta

SEQ ID NO: 21190 - DNA, 21 bp, Homo sapiens
ttctccactgyggttctaaca

SEQ ID NO: 21191 - DNA, 21 bp, Homo sapiens
tgtttcaactrccaagctttg

SEQ ID NO: 21192 - DNA, 21 bp, Homo sapiens
cacccactacrtgagctactg

SEQ ID NO: 21193 - DNA, 21 bp, Homo sapiens
agaaggccagragtggctggg

SEQ ID NO: 21194 - DNA, 21 bp, Homo sapiens
agagaggaagragggctctgg

SEQ ID NO: 21195 - DNA, 21 bp, Homo sapiens
tctttctgtcyctgatctatc

SEQ ID NO: 21196 - DNA, 21 bp, Homo sapiens
ccggtgagggyctgcgttctg

SEQ ID NO: 21197 - DNA, 21 bp, Homo sapiens
tgagtcatccrcagggactag

SEQ ID NO: 21198 - DNA, 21 bp, Homo sapiens
ataaacttctrttgtgtcaca

SEQ ID NO: 21199 - DNA, 21 bp, Homo sapiens
tacatgactcrtacaatcttt

SEQ ID NO: 21200 - DNA, 21 bp, Homo sapiens
catgaagatgmatggcacagc

SEQ ID NO: 21201 - DNA, 21 bp, Homo sapiens
cagacagtatrcatactatga

SEQ ID NO: 21202 - DNA, 21 bp, Homo sapiens
tgagactagcrtactggttct

SEQ ID NO: 21203 - DNA, 21 bp, Homo sapiens
ttctaacgaarccttcaccaa

SEQ ID NO: 21204 - DNA, 21 bp, Homo sapiens
caagaaagtcyagtatctatt

SEQ ID NO: 21205 - DNA, 21 bp, Homo sapiens
tgacatttccrcttattagtt

SEQ ID NO: 21206 - DNA, 21 bp, Homo sapiens
gcagttgctgygaagggggag

SEQ ID NO: 21207 - DNA, 21 bp, Homo sapiens
gtgggctgccrtggacgccat

SEQ ID NO: 21208 - DNA, 21 bp, Homo sapiens
taaaggcactrggaaagggac

SEQ ID NO: 21209 - DNA, 21 bp, Homo sapiens
ttaatccatgygcttatgtca

SEQ ID NO: 21210 - DNA, 21 bp, Homo sapiens
tgtccctcccygcaattcccc

SEQ ID NO: 21211 - DNA, 21 bp, Homo sapiens
tccaaacttcmttcagcttat

SEQ ID NO: 21212 - DNA, 21 bp, Homo sapiens
agtaacacaaktagcttagcc

SEQ ID NO: 21213 - DNA, 21 bp, Homo sapiens
atagctgctgygcctgactgc

SEQ ID NO: 21214 - DNA, 21 bp, Homo sapiens
tccattctgtyggttcaatta

SEQ ID NO: 21215 - DNA, 21 bp, Homo sapiens
acatttacaamaattctccca

SEQ ID NO: 21216 - DNA, 21 bp, Homo sapiens
ctaatcttcaygacccttgat

SEQ ID NO: 21217 - DNA, 21 bp, Homo sapiens
tcaatccaaamttattggaag

SEQ ID NO: 21218 - DNA, 21 bp, Homo sapiens
taaacaaggaycaaagtccgc

SEQ ID NO: 21219 - DNA, 21 bp, Homo sapiens
gctcaagtttrgtaagactgg

SEQ ID NO: 21220 - DNA, 21 bp, Homo sapiens
ccactaggaayatgggtctac

SEQ ID NO: 21221 - DNA, 21 bp, Homo sapiens
aagggatggargtgggtagaa

SEQ ID NO: 21222 - DNA, 21 bp, Homo sapiens
aatgccacagmcttgtaagtt

SEQ ID NO: 21223 - DNA, 21 bp, Homo sapiens
ctttcttccakaccctggctg

SEQ ID NO: 21224 - DNA, 21 bp, Homo sapiens
accagggaatkgaagggatgc

SEQ ID NO: 21225 - DNA, 21 bp, Homo sapiens
cttccgggccmtgcatgtagc

SEQ ID NO: 21226 - DNA, 21 bp, Homo sapiens
aagttaagtayggaatagaca

SEQ ID NO: 21227 - DNA, 21 bp, Homo sapiens
aaaatgagcartgtgtcggtt

SEQ ID NO: 21228 - DNA, 21 bp, Homo sapiens
gaaatcctagygtcagcaagt

SEQ ID NO: 21229 - DNA, 21 bp, Homo sapiens
agaccacacakacactcatcg

SEQ ID NO: 21230 - DNA, 21 bp, Homo sapiens
aggactttgtragggataacc

SEQ ID NO: 21231 - DNA, 21 bp, Homo sapiens
ctaaagattcrgtctggtttg

SEQ ID NO: 21232 - DNA, 21 bp, Homo sapiens
taaaaaaggarattctcttgg

SEQ ID NO: 21233 - DNA, 21 bp, Homo sapiens
cagactgagaytgttgaaaag

SEQ ID NO: 21234 - DNA, 21 bp, Homo sapiens
cattcagggamaaagaactaa

SEQ ID NO: 21235 - DNA, 21 bp, Homo sapiens
acacacacatytgtaaatttc

SEQ ID NO: 21236 - DNA, 21 bp, Homo sapiens
tgtgtcctgakaattctgcat

SEQ ID NO: 21237 - DNA, 21 bp, Homo sapiens
tgaaaatgttyggttacttcc

SEQ ID NO: 21238 - DNA, 21 bp, Homo sapiens
tgtagatttcrgtgctcagca

SEQ ID NO: 21239 - DNA, 21 bp, Homo sapiens
tataccagaaytgaaccattg

SEQ ID NO: 21240 - DNA, 21 bp, Homo sapiens
gctagagatamctcatggata

SEQ ID NO: 21241 - DNA, 21 bp, Homo sapiens
ctgtttgtcaytgatttgtca

SEQ ID NO: 21242 - DNA, 21 bp, Homo sapiens
aagttataagygattagtcct

SEQ ID NO: 21243 - DNA, 21 bp, Homo sapiens
gttctccacaktgtcttctcc

SEQ ID NO: 21244 - DNA, 21 bp, Homo sapiens
aagaagagtaraaagggatat

SEQ ID NO: 21245 - DNA, 21 bp, Homo sapiens
cgacttaataratggtataga

SEQ ID NO: 21246 - DNA, 21 bp, Homo sapiens
tgtgagtcagrttttcttaag

SEQ ID NO: 21247 - DNA, 21 bp, Homo sapiens
attgcacaaaygtagtgaggt

SEQ ID NO: 21248 - DNA, 21 bp, Homo sapiens
tgtttaaaaaygtaaacaagg

SEQ ID NO: 21249 - DNA, 21 bp, Homo sapiens
gtttgtattcygagaaatgct

SEQ ID NO: 21250 - DNA, 21 bp, Homo sapiens
ataattcattytgattccgct

SEQ ID NO: 21251 - DNA, 21 bp, Homo sapiens
tcatattgcartggctctgag

SEQ ID NO: 21252 - DNA, 21 bp, Homo sapiens
cttctaaaacktgtcctactc

SEQ ID NO: 21253 - DNA, 21 bp, Homo sapiens
tcaaagcaagrtgtttctcct

SEQ ID NO: 21254 - DNA, 21 bp, Homo sapiens
tttttcacaaytggatatcct

SEQ ID NO: 21255 - DNA, 21 bp, Homo sapiens
ggagctgacartgagtgctct

SEQ ID NO: 21256 - DNA, 21 bp, Homo sapiens
tacatcagctytgccatgttc

SEQ ID NO: 21257 - DNA, 21 bp, Homo sapiens
attgttttgtrccctttatct

SEQ ID NO: 21258 - DNA, 21 bp, Homo sapiens
tcgtaggagtkgtctgagatt

SEQ ID NO: 21259 - DNA, 21 bp, Homo sapiens
atggcagaccrttgctatggc

SEQ ID NO: 21260 - DNA, 21 bp, Homo sapiens
gagcagttatmtgtgtatgtc

SEQ ID NO: 21261 - DNA, 21 bp, Homo sapiens
tgcgtcttgaygacatgaaac

SEQ ID NO: 21262 - DNA, 21 bp, Homo sapiens
ggtcactaaargggatataac

SEQ ID NO: 21263 - DNA, 21 bp, Homo sapiens
gagaaatggtkttatagctgg

SEQ ID NO: 21264 - DNA, 21 bp, Homo sapiens
gatttttatcrtctcagaaac

SEQ ID NO: 21265 - DNA, 21 bp, Homo sapiens
aggtgttaagyaccatccaat

SEQ ID NO: 21266 - DNA, 21 bp, Homo sapiens
tcttccactcktttccttgga

SEQ ID NO: 21267 - DNA, 21 bp, Homo sapiens
ttatcacatayttaaaggcat

SEQ ID NO: 21268 - DNA, 21 bp, Homo sapiens
tgtcgtcaggrttgagaacca

SEQ ID NO: 21269 - DNA, 21 bp, Homo sapiens
tctgtagattyccgccgtctg

SEQ ID NO: 21270 - DNA, 21 bp, Homo sapiens
agttgcgagcyccaaacccta

SEQ ID NO: 21271 - DNA, 21 bp, Homo sapiens
accccccgccrtgatcccatc

SEQ ID NO: 21272 - DNA, 21 bp, Homo sapiens
aaggggatatraggatagcaa

SEQ ID NO: 21273 - DNA, 21 bp, Homo sapiens
cttttgttagyggatggacca

SEQ ID NO: 21274 - DNA, 21 bp, Homo sapiens
gactatttggygacatatttc

SEQ ID NO: 21275 - DNA, 21 bp, Homo sapiens
ttagtcaaatmtgtgttcacc

SEQ ID NO: 21276 - DNA, 21 bp, Homo sapiens
caggtagccaktaggattgcc

SEQ ID NO: 21277 - DNA, 21 bp, Homo sapiens
cagttctggtkgggtaacatg

SEQ ID NO: 21278 - DNA, 21 bp, Homo sapiens
atgtaattccygataggggaa

SEQ ID NO: 21279 - DNA, 21 bp, Homo sapiens
atcgcaatacrttgggactgc

SEQ ID NO: 21280 - DNA, 21 bp, Homo sapiens
tgatcacaaaygattgggtca

SEQ ID NO: 21281 - DNA, 21 bp, Homo sapiens
gcagaagacarattctatttc

SEQ ID NO: 21282 - DNA, 21 bp, Homo sapiens
tctcctcatgrtcccagatgg

SEQ ID NO: 21283 - DNA, 21 bp, Homo sapiens
acagactgacytaaatctact

SEQ ID NO: 21284 - DNA, 21 bp, Homo sapiens
aacattaagcraagatatgag

SEQ ID NO: 21285 - DNA, 21 bp, Homo sapiens
tgctggtcagygcttctagag

SEQ ID NO: 21286 - DNA, 21 bp, Homo sapiens
cccaatagcaygttctccgac

SEQ ID NO: 21287 - DNA, 21 bp, Homo sapiens
agaatcagccraatgcttctc

SEQ ID NO: 21288 - DNA, 21 bp, Homo sapiens
caacaagctcrttgaaggaga

SEQ ID NO: 21289 - DNA, 21 bp, Homo sapiens
catctctaccraaaatacaaa

SEQ ID NO: 21290 - DNA, 21 bp, Homo sapiens
ccaaatccctrtattcaatcc

SEQ ID NO: 21291 - DNA, 21 bp, Homo sapiens
tagggcctccrgtggcttcct

SEQ ID NO: 21292 - DNA, 21 bp, Homo sapiens
ctgctggaggyacattattgg

SEQ ID NO: 21293 - DNA, 21 bp, Homo sapiens
ttcttcagacrtagcctccat

SEQ ID NO: 21294 - DNA, 21 bp, Homo sapiens
gttccagccayctggggcttc

SEQ ID NO: 21295 - DNA, 21 bp, Homo sapiens
tctggctggargttcctgagg

SEQ ID NO: 21296 - DNA, 21 bp, Homo sapiens
cacgtgttccrtggtggcagg

SEQ ID NO: 21297 - DNA, 21 bp, Homo sapiens
agggccctggkgctatccatt

SEQ ID NO: 21298 - DNA, 21 bp, Homo sapiens
tattattttayatttttgcaa

SEQ ID NO: 21299 - DNA, 21 bp, Homo sapiens
gtcagggccamcttgttttgt

SEQ ID NO: 21300 - DNA, 21 bp, Homo sapiens
aagaaagacgkgcttgctcta

SEQ ID NO: 21301 - DNA, 21 bp, Homo sapiens
aagcctggaakttcatggaca

SEQ ID NO: 21302 - DNA, 21 bp, Homo sapiens
aggatgagctrcttttcatgg

SEQ ID NO: 21303 - DNA, 21 bp, Homo sapiens
aagccattgtytcccaaatga

SEQ ID NO: 21304 - DNA, 21 bp, Homo sapiens
gccgggctccrtggataatga

SEQ ID NO: 21305 - DNA, 21 bp, Homo sapiens
ttcttaacctrtctcatgttc

SEQ ID NO: 21306 - DNA, 21 bp, Homo sapiens
tcaccccctgmccccctcccc

SEQ ID NO: 21307 - DNA, 21 bp, Homo sapiens
gtagactgctktattcctagc

SEQ ID NO: 21308 - DNA, 21 bp, Homo sapiens
aagaaggaatkacgaaaaaac

SEQ ID NO: 21309 - DNA, 21 bp, Homo sapiens
aagggagaggytgcattgctc

SEQ ID NO: 21310 - DNA, 21 bp, Homo sapiens
ttgacaaaaamgtatagcaca

SEQ ID NO: 21311 - DNA, 21 bp, Homo sapiens
cattgggaagytcccaagtca

SEQ ID NO: 21312 - DNA, 21 bp, Homo sapiens
cccaggctctyggcagcagct

SEQ ID NO: 21313 - DNA, 21 bp, Homo sapiens
tgttccaaagrgaactgaagt

SEQ ID NO: 21314 - DNA, 21 bp, Homo sapiens
ggagatgcccygggttttcat

SEQ ID NO: 21315 - DNA, 21 bp, Homo sapiens
acacctgagcyaagctccatc

SEQ ID NO: 21316 - DNA, 21 bp, Homo sapiens
tacttcaaaakggtgttccag

SEQ ID NO: 21317 - DNA, 21 bp, Homo sapiens
ggtgataacargtatattttg

SEQ ID NO: 21318 - DNA, 21 bp, Homo sapiens
cgaggatcaaygtccagaacc

SEQ ID NO: 21319 - DNA, 21 bp, Homo sapiens
cctgtgtcctyaggaagacaa

SEQ ID NO: 21320 - DNA, 21 bp, Homo sapiens
gagagccatgygtgttcacag

SEQ ID NO: 21321 - DNA, 21 bp, Homo sapiens
taaggtgcaayaacataaact

SEQ ID NO: 21322 - DNA, 21 bp, Homo sapiens
cacgttaaatrgagctctccc

SEQ ID NO: 21323 - DNA, 21 bp, Homo sapiens
attgtccataytggaactaga

SEQ ID NO: 21324 - DNA, 21 bp, Homo sapiens
acaaatgcgaygtgcagacat

SEQ ID NO: 21325 - DNA, 21 bp, Homo sapiens
ggctataaccrcgaaggggtc

SEQ ID NO: 21326 - DNA, 21 bp, Homo sapiens
tcactcctgcygctccctacg

SEQ ID NO: 21327 - DNA, 21 bp, Homo sapiens
ataagtgacayattggctgca

SEQ ID NO: 21328 - DNA, 21 bp, Homo sapiens
agaagttagcmcaggtggtcc

SEQ ID NO: 21329 - DNA, 21 bp, Homo sapiens
tatatcttccyaccacactca

SEQ ID NO: 21330 - DNA, 21 bp, Homo sapiens
ttcagctcaargaactgagga

SEQ ID NO: 21331 - DNA, 21 bp, Homo sapiens
tcacattatamttgtaacaca

SEQ ID NO: 21332 - DNA, 21 bp, Homo sapiens
gggttgtttcrgcagcattta

SEQ ID NO: 21333 - DNA, 21 bp, Homo sapiens
tatctaaacamgtagcacagg

SEQ ID NO: 21334 - DNA, 21 bp, Homo sapiens
gaaatcccatytcgtcactga

SEQ ID NO: 21335 - DNA, 21 bp, Homo sapiens
cggatggaccraaggagactg

SEQ ID NO: 21336 - DNA, 21 bp, Homo sapiens
ggttgttccakaatgatacgg

SEQ ID NO: 21337 - DNA, 21 bp, Homo sapiens
cccctgcagamcctggacttt

SEQ ID NO: 21338 - DNA, 21 bp, Homo sapiens
gggtggggagkatgagcacca

SEQ ID NO: 21339 - DNA, 21 bp, Homo sapiens
cctaatgaaartacatacttc

SEQ ID NO: 21340 - DNA, 21 bp, Homo sapiens
ctcaggcccarctgccagact

SEQ ID NO: 21341 - DNA, 21 bp, Homo sapiens
ggcctgagaarttggggggct

SEQ ID NO: 21342 - DNA, 21 bp, Homo sapiens
agaggcaggtraaattacctc

SEQ ID NO: 21343 - DNA, 21 bp, Homo sapiens
ttgcctgcgcrggacggaggt

SEQ ID NO: 21344 - DNA, 21 bp, Homo sapiens
cccatgcagaygcttggctga

SEQ ID NO: 21345 - DNA, 21 bp, Homo sapiens
ggtattgtctratcattcctt

SEQ ID NO: 21346 - DNA, 21 bp, Homo sapiens
cttgtcttgcrggagagagtg

SEQ ID NO: 21347 - DNA, 21 bp, Homo sapiens
gataatgaaayacttaggtat

SEQ ID NO: 21348 - DNA, 21 bp, Homo sapiens
aatcctcatcygtttgttttt

SEQ ID NO: 21349 - DNA, 21 bp, Homo sapiens
tctctcctggmtgcttgcttt

SEQ ID NO: 21350 - DNA, 21 bp, Homo sapiens
ttgtcatgcaygaaggacaac

SEQ ID NO: 21351 - DNA, 21 bp, Homo sapiens
gtacgcattcyggaagaactt

SEQ ID NO: 21352 - DNA, 21 bp, Homo sapiens
ccctcagcatrctgctctttc

SEQ ID NO: 21353 - DNA, 21 bp, Homo sapiens
gcatgaatcgraggcctttgg

SEQ ID NO: 21354 - DNA, 21 bp, Homo sapiens
tcagtaacttyagctgattgc

SEQ ID NO: 21355 - DNA, 21 bp, Homo sapiens
aatcaacagcyacgagaccac

SEQ ID NO: 21356 - DNA, 21 bp, Homo sapiens
acctcaaattrgaataacgga

SEQ ID NO: 21357 - DNA, 21 bp, Homo sapiens
agtgaggcatrgggaacctct

SEQ ID NO: 21358 - DNA, 21 bp, Homo sapiens
aggggcttgckatcatgtcct

SEQ ID NO: 21359 - DNA, 21 bp, Homo sapiens
aaaagcgctcytgttctcact

SEQ ID NO: 21360 - DNA, 21 bp, Homo sapiens
tgcctggaggrtacaagccag

SEQ ID NO: 21361 - DNA, 21 bp, Homo sapiens
gtgacatgacrtctgttgttg

SEQ ID NO: 21362 - DNA, 21 bp, Homo sapiens
cctgaaatgtmctggacccct

SEQ ID NO: 21363 - DNA, 21 bp, Homo sapiens
atgtcctccarggtgcttcaa

SEQ ID NO: 21364 - DNA, 21 bp, Homo sapiens
tgaaagggaaygtgtgtgggg

SEQ ID NO: 21365 - DNA, 21 bp, Homo sapiens
aactacaaacmcatatattct

SEQ ID NO: 21366 - DNA, 21 bp, Homo sapiens
gttaccagagmacacagccct

SEQ ID NO: 21367 - DNA, 21 bp, Homo sapiens
tttcctcaatragaagtcaca

SEQ ID NO: 21368 - DNA, 21 bp, Homo sapiens
atcccatctgycacagaaggt

SEQ ID NO: 21369 - DNA, 21 bp, Homo sapiens
agcatgaggtrggaatgggtt

SEQ ID NO: 21370 - DNA, 21 bp, Homo sapiens
ccaaaaacacrtgcctcgcct

SEQ ID NO: 21371 - DNA, 21 bp, Homo sapiens
ctccctagcaraaggagcctc

SEQ ID NO: 21372 - DNA, 21 bp, Homo sapiens
gcttgctcccycaacaaacgt

SEQ ID NO: 21373 - DNA, 21 bp, Homo sapiens
tgctcagtgcrtctctaactg

SEQ ID NO: 21374 - DNA, 21 bp, Homo sapiens
ccataagactrtaggggttag

SEQ ID NO: 21375 - DNA, 21 bp, Homo sapiens
attttgtcatygtgcccagga

SEQ ID NO: 21376 - DNA, 21 bp, Homo sapiens
acttacaggayctttttttta

SEQ ID NO: 21377 - DNA, 21 bp, Homo sapiens
attaccaacaytccccaccac

SEQ ID NO: 21378 - DNA, 21 bp, Homo sapiens
aggactttatyccatgtcagg

SEQ ID NO: 21379 - DNA, 21 bp, Homo sapiens
accttctaacrtactgtacag

SEQ ID NO: 21380 - DNA, 21 bp, Homo sapiens
tcaggaattcytaggcatttg

SEQ ID NO: 21381 - DNA, 21 bp, Homo sapiens
tccctttgtaktttaacaatc

SEQ ID NO: 21382 - DNA, 21 bp, Homo sapiens
gctagttaaaygaaaagtaaa

SEQ ID NO: 21383 - DNA, 21 bp, Homo sapiens
aagcaaggtargagtgaccag

SEQ ID NO: 21384 - DNA, 21 bp, Homo sapiens
atctaaggatrgaaaaaaaaa

SEQ ID NO: 21385 - DNA, 21 bp, Homo sapiens
tacttcaaacractgtcatta

SEQ ID NO: 21386 - DNA, 21 bp, Homo sapiens
gcccttgttcyccagccttag

SEQ ID NO: 21387 - DNA, 21 bp, Homo sapiens
aggatactacygtgctctcag

SEQ ID NO: 21388 - DNA, 21 bp, Homo sapiens
gggatcagttktgaggccaag

SEQ ID NO: 21389 - DNA, 21 bp, Homo sapiens
tgatgtgcagrcagtatgcat

SEQ ID NO: 21390 - DNA, 21 bp, Homo sapiens
tgttgaaggtrgtgcaaccat

SEQ ID NO: 21391 - DNA, 21 bp, Homo sapiens
cattcatgtartcaatatctg

SEQ ID NO: 21392 - DNA, 21 bp, Homo sapiens
ccatgactggkctaatgagtg

SEQ ID NO: 21393 - DNA, 21 bp, Homo sapiens
ggtttatgttycttgcaatgg

SEQ ID NO: 21394 - DNA, 21 bp, Homo sapiens
aggtaccaatygtcccataaa

SEQ ID NO: 21395 - DNA, 21 bp, Homo sapiens
tggaggtgatrgtaaacagtc

SEQ ID NO: 21396 - DNA, 21 bp, Homo sapiens
acagaacatcrggccacagaa

SEQ ID NO: 21397 - DNA, 21 bp, Homo sapiens
ataaagtagayagcaaggcaa

SEQ ID NO: 21398 - DNA, 21 bp, Homo sapiens
tccaatggctkttgcccgctt

SEQ ID NO: 21399 - DNA, 21 bp, Homo sapiens
gcactgtggtkgacagcgatg

SEQ ID NO: 21400 - DNA, 21 bp, Homo sapiens
catcagctgtygaatggtggc

SEQ ID NO: 21401 - DNA, 21 bp, Homo sapiens
gaagggttagyaccaaacaca

SEQ ID NO: 21402 - DNA, 21 bp, Homo sapiens
ctactgtacaygagtcatgca

SEQ ID NO: 21403 - DNA, 21 bp, Homo sapiens
agcaagagcayatggaacctg

SEQ ID NO: 21404 - DNA, 21 bp, Homo sapiens
gaaatcagaargcacttgcac

SEQ ID NO: 21405 - DNA, 21 bp, Homo sapiens
aagctaggtgytttgagtagg

SEQ ID NO: 21406 - DNA, 21 bp, Homo sapiens
ctactttgtcytctgtaatgc

SEQ ID NO: 21407 - DNA, 21 bp, Homo sapiens
tgaaagagaaycatacacaca

SEQ ID NO: 21408 - DNA, 21 bp, Homo sapiens
atggggagatragaggctgct

SEQ ID NO: 21409 - DNA, 21 bp, Homo sapiens
aattcagttcrttaggcataa

SEQ ID NO: 21410 - DNA, 21 bp, Homo sapiens
tatcaaactayctgcttcagg

SEQ ID NO: 21411 - DNA, 21 bp, Homo sapiens
tagcctctgcyagattactaa

SEQ ID NO: 21412 - DNA, 21 bp, Homo sapiens
tatttttctcytctttttcta

SEQ ID NO: 21413 - DNA, 21 bp, Homo sapiens
ttgtctgagayctacaattag

SEQ ID NO: 21414 - DNA, 21 bp, Homo sapiens
acaaatcaggrtgaatggtca

SEQ ID NO: 21415 - DNA, 21 bp, Homo sapiens
tccttcatctrtaaggttttt

SEQ ID NO: 21416 - DNA, 21 bp, Homo sapiens
gctggaaggcrggtaggttga

SEQ ID NO: 21417 - DNA, 21 bp, Homo sapiens
cttagcccacygctgtcctcc

SEQ ID NO: 21418 - DNA, 21 bp, Homo sapiens
aaagcctcctytccgactttg

SEQ ID NO: 21419 - DNA, 21 bp, Homo sapiens
gaaaggattcygaacccatta

SEQ ID NO: 21420 - DNA, 21 bp, Homo sapiens
tcatgaaaacrtctaatgttt

SEQ ID NO: 21421 - DNA, 21 bp, Homo sapiens
gaaaatgcctyatacccacta

SEQ ID NO: 21422 - DNA, 21 bp, Homo sapiens
aggaaacaccytaagtagtaa

SEQ ID NO: 21423 - DNA, 21 bp, Homo sapiens
cctgcggttartttccaccag

SEQ ID NO: 21424 - DNA, 21 bp, Homo sapiens
ctctgcccaarcctttgagca

SEQ ID NO: 21425 - DNA, 21 bp, Homo sapiens
tttttctcttrccgtgatgtt

SEQ ID NO: 21426 - DNA, 21 bp, Homo sapiens
cagtgccttgytcataatggg

SEQ ID NO: 21427 - DNA, 21 bp, Homo sapiens
attctccaagrcatgatttgc

SEQ ID NO: 21428 - DNA, 21 bp, Homo sapiens
catccttatarccacactaca

SEQ ID NO: 21429 - DNA, 21 bp, Homo sapiens
attttatcccrttggctaaaa

SEQ ID NO: 21430 - DNA, 21 bp, Homo sapiens
ttctagctcaratcatgaagg

SEQ ID NO: 21431 - DNA, 21 bp, Homo sapiens
atatgtagagytagtgctgcc

SEQ ID NO: 21432 - DNA, 21 bp, Homo sapiens
aggctgaacaygtttaaagat

SEQ ID NO: 21433 - DNA, 21 bp, Homo sapiens
tgaccttcaayacccaaaaaa

SEQ ID NO: 21434 - DNA, 21 bp, Homo sapiens
acggtgcgggkcacgcatggg

SEQ ID NO: 21435 - DNA, 21 bp, Homo sapiens
tcctaagctcyggacaggcca

SEQ ID NO: 21436 - DNA, 21 bp, Homo sapiens
actggctgccyggcaggaact

SEQ ID NO: 21437 - DNA, 21 bp, Homo sapiens
ctggagatatraagaagttat

SEQ ID NO: 21438 - DNA, 21 bp, Homo sapiens
agcttgcaagrgctgctggag

SEQ ID NO: 21439 - DNA, 21 bp, Homo sapiens
atttttcccayggtgaattgt

SEQ ID NO: 21440 - DNA, 21 bp, Homo sapiens
gtaagagcaamactgatagct

SEQ ID NO: 21441 - DNA, 21 bp, Homo sapiens
cgcgttgaccrtacgtctcag

SEQ ID NO: 21442 - DNA, 21 bp, Homo sapiens
gacaactagcrtggagtctgg

SEQ ID NO: 21443 - DNA, 21 bp, Homo sapiens
ctattagtacycatatagtca

SEQ ID NO: 21444 - DNA, 21 bp, Homo sapiens
tcctgcctccyatcctggcca

SEQ ID NO: 21445 - DNA, 21 bp, Homo sapiens
ggctgagactyagcccaggct

SEQ ID NO: 21446 - DNA, 21 bp, Homo sapiens
acacaaacacrgagtggcccg

SEQ ID NO: 21447 - DNA, 21 bp, Homo sapiens
ccaccgactcrctgtgtaatc

SEQ ID NO: 21448 - DNA, 21 bp, Homo sapiens
aagaaggtggkgagaggcaga

SEQ ID NO: 21449 - DNA, 21 bp, Homo sapiens
aggcgcctacytggcatcctg

SEQ ID NO: 21450 - DNA, 21 bp, Homo sapiens
tgtacagggtrccagccacct

SEQ ID NO: 21451 - DNA, 21 bp, Homo sapiens
tctgggctggytggggtctgc

SEQ ID NO: 21452 - DNA, 21 bp, Homo sapiens
ctcgtgccccyacccctgggt

SEQ ID NO: 21453 - DNA, 21 bp, Homo sapiens
aacaaggtgcratgaactggc

SEQ ID NO: 21454 - DNA, 21 bp, Homo sapiens
gaaatactatygtacttcaaa

SEQ ID NO: 21455 - DNA, 21 bp, Homo sapiens
gaaagaatccrcaccacatac

SEQ ID NO: 21456 - DNA, 21 bp, Homo sapiens
caaactttgtrtcaccaagta

SEQ ID NO: 21457 - DNA, 21 bp, Homo sapiens
ttaaaaacaayatgggacttc

SEQ ID NO: 21458 - DNA, 21 bp, Homo sapiens
tcaggctcctyggaaagccac

SEQ ID NO: 21459 - DNA, 21 bp, Homo sapiens
cagccacaggrtgaagacttg

SEQ ID NO: 21460 - DNA, 21 bp, Homo sapiens
tctccatgcaygagcctgcat

SEQ ID NO: 21461 - DNA, 21 bp, Homo sapiens
gacctagaaayagatgcccag

SEQ ID NO: 21462 - DNA, 21 bp, Homo sapiens
tgaacatgacyctcaaagtaa

SEQ ID NO: 21463 - DNA, 21 bp, Homo sapiens
caggaaaactragactgagag

SEQ ID NO: 21464 - DNA, 21 bp, Homo sapiens
ctgatgaatgrtctcttcata

SEQ ID NO: 21465 - DNA, 21 bp, Homo sapiens
aataagagggractcctgtgt

SEQ ID NO: 21466 - DNA, 21 bp, Homo sapiens
ttctgctgtgyccaccatcta

SEQ ID NO: 21467 - DNA, 21 bp, Homo sapiens
tatttacagtkgttgaaggca

SEQ ID NO: 21468 - DNA, 21 bp, Homo sapiens
aaggtcacacrggaagaggct

SEQ ID NO: 21469 - DNA, 21 bp, Homo sapiens
cccttcaggcrcgggtagttc

SEQ ID NO: 21470 - DNA, 21 bp, Homo sapiens
gaaaagagaamattctggaaa

SEQ ID NO: 21471 - DNA, 21 bp, Homo sapiens
tgagattgcayggcttggggt

SEQ ID NO: 21472 - DNA, 21 bp, Homo sapiens
gtctgtattcrcagcaacctt

SEQ ID NO: 21473 - DNA, 21 bp, Homo sapiens
acagacgctcrtctcctctgt

SEQ ID NO: 21474 - DNA, 21 bp, Homo sapiens
gcttggggccktgaaccccaa

SEQ ID NO: 21475 - DNA, 21 bp, Homo sapiens
taggaaagatmgagggaggat

SEQ ID NO: 21476 - DNA, 21 bp, Homo sapiens
tgcagcaagtycttaatgctg

SEQ ID NO: 21477 - DNA, 21 bp, Homo sapiens
aggtcacagaygcatcgggag

SEQ ID NO: 21478 - DNA, 21 bp, Homo sapiens
gagatgttggkcagcagtcaa

SEQ ID NO: 21479 - DNA, 21 bp, Homo sapiens
agcttctctcrcattctttca

SEQ ID NO: 21480 - DNA, 21 bp, Homo sapiens
cccagtttagygacctcaagt

SEQ ID NO: 21481 - DNA, 21 bp, Homo sapiens
gtgaccctccycaagcttgga

SEQ ID NO: 21482 - DNA, 21 bp, Homo sapiens
tggaagagttrggtcttaaat

SEQ ID NO: 21483 - DNA, 21 bp, Homo sapiens
agggtgaggcrtgacaccctg

SEQ ID NO: 21484 - DNA, 21 bp, Homo sapiens
ccaatttgggrgaagatattc

SEQ ID NO: 21485 - DNA, 21 bp, Homo sapiens
gagcttcccgmaccaggcgct

SEQ ID NO: 21486 - DNA, 21 bp, Homo sapiens
tgtttccatgytgaacacctg

SEQ ID NO: 21487 - DNA, 21 bp, Homo sapiens
aatagcattcmaacactcttt

SEQ ID NO: 21488 - DNA, 21 bp, Homo sapiens
gaagagacagrcatgggtttg

SEQ ID NO: 21489 - DNA, 21 bp, Homo sapiens
gtagactggargaaacctccc

SEQ ID NO: 21490 - DNA, 21 bp, Homo sapiens
aacagccccgmaaggtcattt

SEQ ID NO: 21491 - DNA, 21 bp, Homo sapiens
cgctgtgtcaygaggagctgt

SEQ ID NO: 21492 - DNA, 21 bp, Homo sapiens
agcctaggccrccactgatag

SEQ ID NO: 21493 - DNA, 21 bp, Homo sapiens
gttgtaaaaaraaggtgaaag

SEQ ID NO: 21494 - DNA, 21 bp, Homo sapiens
gtttgcaacckatggaaactc

SEQ ID NO: 21495 - DNA, 21 bp, Homo sapiens
ttggttggcaygaagtcccgt

SEQ ID NO: 21496 - DNA, 21 bp, Homo sapiens
agtccgacagmccaaggggaa

SEQ ID NO: 21497 - DNA, 21 bp, Homo sapiens
accatggcttyctggtttcca

SEQ ID NO: 21498 - DNA, 21 bp, Homo sapiens
cattatttccrtgatactgcc

SEQ ID NO: 21499 - DNA, 21 bp, Homo sapiens
actaagccatyttctaactcc

SEQ ID NO: 21500 - DNA, 21 bp, Homo sapiens
atgaaagaacrtcaaagaagg

SEQ ID NO: 21501 - DNA, 21 bp, Homo sapiens
gaaagtctttrcagataacag

SEQ ID NO: 21502 - DNA, 21 bp, Homo sapiens
ggccaccaaamcttccaatgg

SEQ ID NO: 21503 - DNA, 21 bp, Homo sapiens
gtttctttttytttctttcta

SEQ ID NO: 21504 - DNA, 21 bp, Homo sapiens
gttctgcttcrtctatttctt

SEQ ID NO: 21505 - DNA, 21 bp, Homo sapiens
agatgtctatygagagtaaag

SEQ ID NO: 21506 - DNA, 21 bp, Homo sapiens
caaatagaacrccacaattgt

SEQ ID NO: 21507 - DNA, 21 bp, Homo sapiens
aatatgagagkgtatgaataa

SEQ ID NO: 21508 - DNA, 21 bp, Homo sapiens
tgccagtccayggaaaaattt

SEQ ID NO: 21509 - DNA, 21 bp, Homo sapiens
ttcaatatcaragatatacta

SEQ ID NO: 21510 - DNA, 21 bp, Homo sapiens
gtgcaccttgktttttgtcta

SEQ ID NO: 21511 - DNA, 21 bp, Homo sapiens
ataagatgtayattctaggcc

SEQ ID NO: 21512 - DNA, 21 bp, Homo sapiens
aatttcatgcratatttgtcc

SEQ ID NO: 21513 - DNA, 21 bp, Homo sapiens
tccctttccamaagtgtgtat

SEQ ID NO: 21514 - DNA, 21 bp, Homo sapiens
ctgaaatggaytctaagataa

SEQ ID NO: 21515 - DNA, 21 bp, Homo sapiens
ctgttctccarggcagtttgt

SEQ ID NO: 21516 - DNA, 21 bp, Homo sapiens
tgtggcaattkttttcttcct

SEQ ID NO: 21517 - DNA, 21 bp, Homo sapiens
tccagcatgartttctctaac

SEQ ID NO: 21518 - DNA, 21 bp, Homo sapiens
tcagcatcccrcctctccagg

SEQ ID NO: 21519 - DNA, 21 bp, Homo sapiens
tttgctaaaayaggaaaatca

SEQ ID NO: 21520 - DNA, 21 bp, Homo sapiens
gagaaaaaaamcacaaaagga

SEQ ID NO: 21521 - DNA, 21 bp, Homo sapiens
gatgagagggrcaaattgaat

SEQ ID NO: 21522 - DNA, 21 bp, Homo sapiens
tgatggcttcyttcccacaga

SEQ ID NO: 21523 - DNA, 21 bp, Homo sapiens
tgcaggaagaygtgtatacaa

SEQ ID NO: 21524 - DNA, 21 bp, Homo sapiens
gggaatcaatragcaagatca

SEQ ID NO: 21525 - DNA, 21 bp, Homo sapiens
aagagatttcmtcaacttcat

SEQ ID NO: 21526 - DNA, 21 bp, Homo sapiens
gctcctccccrccccttagtg

SEQ ID NO: 21527 - DNA, 21 bp, Homo sapiens
caattaccacmctgaaaagtg

SEQ ID NO: 21528 - DNA, 21 bp, Homo sapiens
atgggatggayttgtggggaa

SEQ ID NO: 21529 - DNA, 21 bp, Homo sapiens
cgacagttgcrcttgtttttg

SEQ ID NO: 21530 - DNA, 21 bp, Homo sapiens
aagtaaaactycccaactctg

SEQ ID NO: 21531 - DNA, 21 bp, Homo sapiens
caaataactgrtcacagattt

SEQ ID NO: 21532 - DNA, 21 bp, Homo sapiens
ctcccaccccrgacatgcagt

SEQ ID NO: 21533 - DNA, 21 bp, Homo sapiens
aagtagttcayagagctggca

SEQ ID NO: 21534 - DNA, 21 bp, Homo sapiens
tttatgactgraccagttgag

SEQ ID NO: 21535 - DNA, 21 bp, Homo sapiens
agcatcgccartactgaagct

SEQ ID NO: 21536 - DNA, 21 bp, Homo sapiens
tatgagtcagkactgaataac

SEQ ID NO: 21537 - DNA, 21 bp, Homo sapiens
caaaattgaayctcttggttc

SEQ ID NO: 21538 - DNA, 21 bp, Homo sapiens
gctggcctgcyttgctgtgag

SEQ ID NO: 21539 - DNA, 21 bp, Homo sapiens
ctcctgctcayatctcttcct

SEQ ID NO: 21540 - DNA, 21 bp, Homo sapiens
ccagcatggtrtcattatatg

SEQ ID NO: 21541 - DNA, 21 bp, Homo sapiens
gtgaccagggmaagtaggcaa

SEQ ID NO: 21542 - DNA, 21 bp, Homo sapiens
ggtgacggacrtgttcattaa

SEQ ID NO: 21543 - DNA, 21 bp, Homo sapiens
tgtgggattcyaggttggcct

SEQ ID NO: 21544 - DNA, 21 bp, Homo sapiens
ttcccttatcmtgagaggaca

SEQ ID NO: 21545 - DNA, 21 bp, Homo sapiens
agacacctgcyctggcaggtc

SEQ ID NO: 21546 - DNA, 21 bp, Homo sapiens
gctcctagackatgaactcct

SEQ ID NO: 21547 - DNA, 21 bp, Homo sapiens
agctcaaacamttctctttgg

SEQ ID NO: 21548 - DNA, 21 bp, Homo sapiens
gagaggctaarccagaaatgt

SEQ ID NO: 21549 - DNA, 21 bp, Homo sapiens
ggatctctctygcacgggcct

SEQ ID NO: 21550 - DNA, 21 bp, Homo sapiens
tctgaacagckcattgttcct

SEQ ID NO: 21551 - DNA, 21 bp, Homo sapiens
ctaactccatraggaacattc

SEQ ID NO: 21552 - DNA, 21 bp, Homo sapiens
cacattgcatyattttgtcga

SEQ ID NO: 21553 - DNA, 21 bp, Homo sapiens
gatcttacaayactcctgact

SEQ ID NO: 21554 - DNA, 21 bp, Homo sapiens
gggtttatggygtttgtcttc

SEQ ID NO: 21555 - DNA, 21 bp, Homo sapiens
ttacttaccartgagtccacc

SEQ ID NO: 21556 - DNA, 21 bp, Homo sapiens
gcattgaagarggtgtgcaag

SEQ ID NO: 21557 - DNA, 21 bp, Homo sapiens
cacagctactrtggtgatggg

SEQ ID NO: 21558 - DNA, 21 bp, Homo sapiens
cgagatctgayggtttaaagt

SEQ ID NO: 21559 - DNA, 21 bp, Homo sapiens
agccgcagcayggccagtcta

SEQ ID NO: 21560 - DNA, 21 bp, Homo sapiens
catctctataycactttcatc

SEQ ID NO: 21561 - DNA, 21 bp, Homo sapiens
gagggatgttragtacatttc

SEQ ID NO: 21562 - DNA, 21 bp, Homo sapiens
attttacagayggggcaacag

SEQ ID NO: 21563 - DNA, 21 bp, Homo sapiens
taaatatccarttttctgttg

SEQ ID NO: 21564 - DNA, 21 bp, Homo sapiens
ttgttgccatrtattttcttc

SEQ ID NO: 21565 - DNA, 21 bp, Homo sapiens
ctcttaaatgmcccttgtctt

SEQ ID NO: 21566 - DNA, 21 bp, Homo sapiens
gaaaaaccagrtatatataag

SEQ ID NO: 21567 - DNA, 21 bp, Homo sapiens
cgcatgggaargcaaaccctc

SEQ ID NO: 21568 - DNA, 21 bp, Homo sapiens
atgtcccctcrgcaaactccc

SEQ ID NO: 21569 - DNA, 21 bp, Homo sapiens
gaaggaggttkgagggaaggc

SEQ ID NO: 21570 - DNA, 21 bp, Homo sapiens
aaccaagaggrgcttggccct

SEQ ID NO: 21571 - DNA, 21 bp, Homo sapiens
ccattcccccrtctcccacca

SEQ ID NO: 21572 - DNA, 21 bp, Homo sapiens
ggtaaaatatrgtattgaggg

SEQ ID NO: 21573 - DNA, 21 bp, Homo sapiens
tgtaatcgtgrgtgtagcaca

SEQ ID NO: 21574 - DNA, 21 bp, Homo sapiens
ctcttaagtcygtgactgtgt

SEQ ID NO: 21575 - DNA, 21 bp, Homo sapiens
attggaaggayatgatcacca

SEQ ID NO: 21576 - DNA, 21 bp, Homo sapiens
taagcggatargccttactga

SEQ ID NO: 21577 - DNA, 21 bp, Homo sapiens
cagccatgatrggtgctgggc

SEQ ID NO: 21578 - DNA, 21 bp, Homo sapiens
ggcccccaacygacggcaaag

SEQ ID NO: 21579 - DNA, 21 bp, Homo sapiens
ttctcccttcmtttccgcgtg

SEQ ID NO: 21580 - DNA, 21 bp, Homo sapiens
caccatgctcrggtgttcccg

SEQ ID NO: 21581 - DNA, 21 bp, Homo sapiens
gcatcaaagaygagacacacc

SEQ ID NO: 21582 - DNA, 21 bp, Homo sapiens
gctgcagcttycagaatcatt

SEQ ID NO: 21583 - DNA, 21 bp, Homo sapiens
tgtctataccrtgggcccggg

SEQ ID NO: 21584 - DNA, 21 bp, Homo sapiens
tcacaggctcrttacaggcta

SEQ ID NO: 21585 - DNA, 21 bp, Homo sapiens
tccactgaggytgggcatgat

SEQ ID NO: 21586 - DNA, 21 bp, Homo sapiens
tcaggcttccrttcccgcagg

SEQ ID NO: 21587 - DNA, 21 bp, Homo sapiens
tgcaactcagygtggctcact

SEQ ID NO: 21588 - DNA, 21 bp, Homo sapiens
ccaggaggggmtgagggatga

SEQ ID NO: 21589 - DNA, 21 bp, Homo sapiens
tggacacatgytcctgattcg

SEQ ID NO: 21590 - DNA, 21 bp, Homo sapiens
tgacaccatgyactgacagcc

SEQ ID NO: 21591 - DNA, 21 bp, Homo sapiens
atagaggcagratattgtaga

SEQ ID NO: 21592 - DNA, 21 bp, Homo sapiens
accagatgacrccaacaactg

SEQ ID NO: 21593 - DNA, 21 bp, Homo sapiens
tggttgttgcrttgctgtgtt

SEQ ID NO: 21594 - DNA, 21 bp, Homo sapiens
ggatgatccarttctgcttaa

SEQ ID NO: 21595 - DNA, 21 bp, Homo sapiens
aaggccgttaygctattttca

SEQ ID NO: 21596 - DNA, 21 bp, Homo sapiens
aagcaaagggygctgacttgt

SEQ ID NO: 21597 - DNA, 21 bp, Homo sapiens
ctgtattccayacccacatgc

SEQ ID NO: 21598 - DNA, 21 bp, Homo sapiens
caggtgtagaygccctgcatt

SEQ ID NO: 21599 - DNA, 21 bp, Homo sapiens
caaggtgaatrgacccaatag

SEQ ID NO: 21600 - DNA, 21 bp, Homo sapiens
taagatgagtragtgaaagct

SEQ ID NO: 21601 - DNA, 21 bp, Homo sapiens
cctctccgtgytcagcaggta

SEQ ID NO: 21602 - DNA, 21 bp, Homo sapiens
cacatgtggtyggctattgat

SEQ ID NO: 21603 - DNA, 21 bp, Homo sapiens
tatgtgtccarctccatttgg

SEQ ID NO: 21604 - DNA, 21 bp, Homo sapiens
tctggcacccyactcacctct

SEQ ID NO: 21605 - DNA, 21 bp, Homo sapiens
cacgtcactgyagaggctctg

SEQ ID NO: 21606 - DNA, 21 bp, Homo sapiens
gtgctaattcygccagaaaga

SEQ ID NO: 21607 - DNA, 21 bp, Homo sapiens
atacctccgcrtctgagatga

SEQ ID NO: 21608 - DNA, 21 bp, Homo sapiens
tgagtccccaygtttagaagg

SEQ ID NO: 21609 - DNA, 21 bp, Homo sapiens
ccagcgggagycatttgtcat

SEQ ID NO: 21610 - DNA, 21 bp, Homo sapiens
ttggtagatgytgtaatctca

SEQ ID NO: 21611 - DNA, 21 bp, Homo sapiens
gtttactgccrttttctaaaa

SEQ ID NO: 21612 - DNA, 21 bp, Homo sapiens
gtgagaagctrgcttccagag

SEQ ID NO: 21613 - DNA, 21 bp, Homo sapiens
cagtggccatrttggctgcag

SEQ ID NO: 21614 - DNA, 21 bp, Homo sapiens
aagtctggagragaggctgag

SEQ ID NO: 21615 - DNA, 21 bp, Homo sapiens
gcctggcgcamcccctgcccc

SEQ ID NO: 21616 - DNA, 21 bp, Homo sapiens
tatttttctartttcaacctc

SEQ ID NO: 21617 - DNA, 21 bp, Homo sapiens
gcacaaggggyctaatggctt

SEQ ID NO: 21618 - DNA, 21 bp, Homo sapiens
tggtgtgttcmctgcagtgca

SEQ ID NO: 21619 - DNA, 21 bp, Homo sapiens
tttcctgtcartctatcctag

SEQ ID NO: 21620 - DNA, 21 bp, Homo sapiens
tctgaacttcyttgacatgct

SEQ ID NO: 21621 - DNA, 21 bp, Homo sapiens
agtgctaatgyaggaattgga

SEQ ID NO: 21622 - DNA, 21 bp, Homo sapiens
cttgaggaacraagaactctg

SEQ ID NO: 21623 - DNA, 21 bp, Homo sapiens
cttctttattmttcaaaatga

SEQ ID NO: 21624 - DNA, 21 bp, Homo sapiens
ccattttcccmgcacttgcag

SEQ ID NO: 21625 - DNA, 21 bp, Homo sapiens
tggggtctgcytcatgaaact

SEQ ID NO: 21626 - DNA, 21 bp, Homo sapiens
caattcttggrcacttgacag

SEQ ID NO: 21627 - DNA, 21 bp, Homo sapiens
catcagtgctkgcagagaaac

SEQ ID NO: 21628 - DNA, 21 bp, Homo sapiens
actgcagcagrgttgtttgct

SEQ ID NO: 21629 - DNA, 21 bp, Homo sapiens
gcttccaggcmgggaaacgtt

SEQ ID NO: 21630 - DNA, 21 bp, Homo sapiens
ctgacatttamaaagcaacag

SEQ ID NO: 21631 - DNA, 21 bp, Homo sapiens
ggggaggttcytatggaggac

SEQ ID NO: 21632 - DNA, 21 bp, Homo sapiens
gtttatgttgrcattgtgcca

SEQ ID NO: 21633 - DNA, 21 bp, Homo sapiens
gcaattaatgmcaaagaccag

SEQ ID NO: 21634 - DNA, 21 bp, Homo sapiens
ttttatcagcrgcagtgtaac

SEQ ID NO: 21635 - DNA, 21 bp, Homo sapiens
ctagagtggtrtctttcactg

SEQ ID NO: 21636 - DNA, 21 bp, Homo sapiens
ttaattttgcytcccatattt

SEQ ID NO: 21637 - DNA, 21 bp, Homo sapiens
aggtgagataygctgtagcta

SEQ ID NO: 21638 - DNA, 21 bp, Homo sapiens
ccacctcacayagtgtccatc

SEQ ID NO: 21639 - DNA, 21 bp, Homo sapiens
gaatcattctktcattctgct

SEQ ID NO: 21640 - DNA, 21 bp, Homo sapiens
atctccttggyatttgactta

SEQ ID NO: 21641 - DNA, 21 bp, Homo sapiens
cagattgaaayagcccatgtt

SEQ ID NO: 21642 - DNA, 21 bp, Homo sapiens
gatttttagaygtggaactaa

SEQ ID NO: 21643 - DNA, 21 bp, Homo sapiens
cagttgagaaytaataatcta

SEQ ID NO: 21644 - DNA, 21 bp, Homo sapiens
cactacgtgtrtgcctgctgc

SEQ ID NO: 21645 - DNA, 21 bp, Homo sapiens
atgagataaayatgcattcct

SEQ ID NO: 21646 - DNA, 21 bp, Homo sapiens
ccttatgcggraaatgtaaaa

SEQ ID NO: 21647 - DNA, 21 bp, Homo sapiens
taacaccaggygcctgtgaga

SEQ ID NO: 21648 - DNA, 21 bp, Homo sapiens
ctggaggaatrgctgataaaa

SEQ ID NO: 21649 - DNA, 21 bp, Homo sapiens
tttcattattyattttgatac

SEQ ID NO: 21650 - DNA, 21 bp, Homo sapiens
ccttgctgaayatgtttgttc

SEQ ID NO: 21651 - DNA, 21 bp, Homo sapiens
tacataaatargaacatggta

SEQ ID NO: 21652 - DNA, 21 bp, Homo sapiens
agaaagagaargtaagtaggg

SEQ ID NO: 21653 - DNA, 21 bp, Homo sapiens
aaatgttcttractgtaactg

SEQ ID NO: 21654 - DNA, 21 bp, Homo sapiens
gggcttgtaaytttgtaatag

SEQ ID NO: 21655 - DNA, 21 bp, Homo sapiens
cagttgtggaytagcatgagg

SEQ ID NO: 21656 - DNA, 21 bp, Homo sapiens
aagcttcttcycaccgatgtg

SEQ ID NO: 21657 - DNA, 21 bp, Homo sapiens
agagaaatgakcaggcatcat

SEQ ID NO: 21658 - DNA, 21 bp, Homo sapiens
aagttgtggcraaattcatct

SEQ ID NO: 21659 - DNA, 21 bp, Homo sapiens
cactcttcatycaagtcttgg

SEQ ID NO: 21660 - DNA, 21 bp, Homo sapiens
atgcttgactyctagcactgg

SEQ ID NO: 21661 - DNA, 21 bp, Homo sapiens
aagagtatttktcaaagaagg

SEQ ID NO: 21662 - DNA, 21 bp, Homo sapiens
cagcctgtgcmtgagtggtct

SEQ ID NO: 21663 - DNA, 21 bp, Homo sapiens
acaatagcatkgagcagggaa

SEQ ID NO: 21664 - DNA, 21 bp, Homo sapiens
gtacaataggygtaacagtaa

SEQ ID NO: 21665 - DNA, 21 bp, Homo sapiens
tctatcaattyctgtttttct

SEQ ID NO: 21666 - DNA, 21 bp, Homo sapiens
agtttgggaargttttgctaa

SEQ ID NO: 21667 - DNA, 21 bp, Homo sapiens
acatacttttyccattaaaga

SEQ ID NO: 21668 - DNA, 21 bp, Homo sapiens
ctattgagtgyggtagagagc

SEQ ID NO: 21669 - DNA, 21 bp, Homo sapiens
caaaagacaaytacacttgca

SEQ ID NO: 21670 - DNA, 21 bp, Homo sapiens
tagtatctcaytggagtttaa

SEQ ID NO: 21671 - DNA, 21 bp, Homo sapiens
aacagatgggrccaatatcat

SEQ ID NO: 21672 - DNA, 21 bp, Homo sapiens
cagaggccagyatccaggatg

SEQ ID NO: 21673 - DNA, 21 bp, Homo sapiens
cttaaccttgrtgctattgag

SEQ ID NO: 21674 - DNA, 21 bp, Homo sapiens
attctgtcatraaacttctgt

SEQ ID NO: 21675 - DNA, 21 bp, Homo sapiens
cctaatgataygaattgatgt

SEQ ID NO: 21676 - DNA, 21 bp, Homo sapiens
caaaacctgcrtatgaacaga

SEQ ID NO: 21677 - DNA, 21 bp, Homo sapiens
ttgttcttctrtgaacaaata

SEQ ID NO: 21678 - DNA, 21 bp, Homo sapiens
tttatgattcrggagttcttc

SEQ ID NO: 21679 - DNA, 21 bp, Homo sapiens
gagataacttytcatcacagt

SEQ ID NO: 21680 - DNA, 21 bp, Homo sapiens
tactgaacacrtcatattcta

SEQ ID NO: 21681 - DNA, 21 bp, Homo sapiens
actaacatacrcttctcaaaa

SEQ ID NO: 21682 - DNA, 21 bp, Homo sapiens
ttagatacatratttccttta

SEQ ID NO: 21683 - DNA, 21 bp, Homo sapiens
aaaccataacrggtctccacc

SEQ ID NO: 21684 - DNA, 21 bp, Homo sapiens
tagtttcaggyggagtagcca

SEQ ID NO: 21685 - DNA, 21 bp, Homo sapiens
gtgttcttacygtaagtgtat

SEQ ID NO: 21686 - DNA, 21 bp, Homo sapiens
gacagtactcyatctgaagtg

SEQ ID NO: 21687 - DNA, 21 bp, Homo sapiens
ataaggaaaarggcaaaggga

SEQ ID NO: 21688 - DNA, 21 bp, Homo sapiens
atacagaaaaytcacaccctc

SEQ ID NO: 21689 - DNA, 21 bp, Homo sapiens
tatagacaaaygtaaacaaga

SEQ ID NO: 21690 - DNA, 21 bp, Homo sapiens
aatttgtatgycggacaaaga

SEQ ID NO: 21691 - DNA, 21 bp, Homo sapiens
atatgttttaytctgaaaagg

SEQ ID NO: 21692 - DNA, 21 bp, Homo sapiens
caaatcttagmagggtgaaag

SEQ ID NO: 21693 - DNA, 21 bp, Homo sapiens
ggtggctttaytcagggactt

SEQ ID NO: 21694 - DNA, 21 bp, Homo sapiens
cttagaaccayctggaggctg

SEQ ID NO: 21695 - DNA, 21 bp, Homo sapiens
tttcaaagagkatgatttcat

SEQ ID NO: 21696 - DNA, 21 bp, Homo sapiens
ctcggagacartcagacaagc

SEQ ID NO: 21697 - DNA, 21 bp, Homo sapiens
ttttaatcttrgtttactcta

SEQ ID NO: 21698 - DNA, 21 bp, Homo sapiens
tgagtagctcrttctcttgat

SEQ ID NO: 21699 - DNA, 21 bp, Homo sapiens
agaatacagarttaagaagta

SEQ ID NO: 21700 - DNA, 21 bp, Homo sapiens
ctacctatagyggaatctctc

SEQ ID NO: 21701 - DNA, 21 bp, Homo sapiens
attttgctcarcattcaccgt

SEQ ID NO: 21702 - DNA, 21 bp, Homo sapiens
ctaccttggaygcagcgatgc

SEQ ID NO: 21703 - DNA, 21 bp, Homo sapiens
taggggtggtrgaacacattt

SEQ ID NO: 21704 - DNA, 21 bp, Homo sapiens
ggcagccagtrctatgttgaa

SEQ ID NO: 21705 - DNA, 21 bp, Homo sapiens
cagctaaatgraaaactgtga

SEQ ID NO: 21706 - DNA, 21 bp, Homo sapiens
acttgcatgaytctgtctttc

SEQ ID NO: 21707 - DNA, 21 bp, Homo sapiens
aacactaaatrtattcgtata

SEQ ID NO: 21708 - DNA, 21 bp, Homo sapiens
gagagagcccrgtcctggagg

SEQ ID NO: 21709 - DNA, 21 bp, Homo sapiens
agggagttgcycttccaagcc

SEQ ID NO: 21710 - DNA, 21 bp, Homo sapiens
tataaattgtrtgtgaaatca

SEQ ID NO: 21711 - DNA, 21 bp, Homo sapiens
gctccagatarcaaggatcct

SEQ ID NO: 21712 - DNA, 21 bp, Homo sapiens
ataccagcacrttgagaatta

SEQ ID NO: 21713 - DNA, 21 bp, Homo sapiens
cccaagaaatyggtgaataac

SEQ ID NO: 21714 - DNA, 21 bp, Homo sapiens
cctgatcgctrttacagccct

SEQ ID NO: 21715 - DNA, 21 bp, Homo sapiens
agggtaaaacrggccaggaac

SEQ ID NO: 21716 - DNA, 21 bp, Homo sapiens
actctttaccrgctcctttac

SEQ ID NO: 21717 - DNA, 21 bp, Homo sapiens
tccgcagaccrggagcacctg

SEQ ID NO: 21718 - DNA, 21 bp, Homo sapiens
gatttcaggtrtaaaggagac

SEQ ID NO: 21719 - DNA, 21 bp, Homo sapiens
ccgattaggargaacaaacag

SEQ ID NO: 21720 - DNA, 21 bp, Homo sapiens
tttccagagarttgtcagcat

SEQ ID NO: 21721 - DNA, 21 bp, Homo sapiens
gaaaaaataaygaaggaaaat

SEQ ID NO: 21722 - DNA, 21 bp, Homo sapiens
aggtctcctcyaggactatgt

SEQ ID NO: 21723 - DNA, 21 bp, Homo sapiens
tgggggccacygcgaccacgt

SEQ ID NO: 21724 - DNA, 21 bp, Homo sapiens
gagcggctccrcagttgtttg

SEQ ID NO: 21725 - DNA, 21 bp, Homo sapiens
agtttgtagaygtaaagatgt

SEQ ID NO: 21726 - DNA, 21 bp, Homo sapiens
tgaagtgggckagacatgttt

SEQ ID NO: 21727 - DNA, 21 bp, Homo sapiens
atttctaggtrcctttgcaat

SEQ ID NO: 21728 - DNA, 21 bp, Homo sapiens
ccagagacagygaagtaggcc

SEQ ID NO: 21729 - DNA, 21 bp, Homo sapiens
gtttgtgctcrgaaccattgt

SEQ ID NO: 21730 - DNA, 21 bp, Homo sapiens
acatcaaaatygttaacttgc

SEQ ID NO: 21731 - DNA, 21 bp, Homo sapiens
ttctagtcctrctacagaaaa

SEQ ID NO: 21732 - DNA, 21 bp, Homo sapiens
ggagaccaagrcacaaaggat

SEQ ID NO: 21733 - DNA, 21 bp, Homo sapiens
agtgcaaccartgagaaaacg

SEQ ID NO: 21734 - DNA, 21 bp, Homo sapiens
ttaattgttayggaaaaaatg

SEQ ID NO: 21735 - DNA, 21 bp, Homo sapiens
tatcaggctcygaaatttaga

SEQ ID NO: 21736 - DNA, 21 bp, Homo sapiens
cagctcacaartctattcttt

SEQ ID NO: 21737 - DNA, 21 bp, Homo sapiens
tttagctgaaygggctctaaa

SEQ ID NO: 21738 - DNA, 21 bp, Homo sapiens
tagactctatygaatattatt

SEQ ID NO: 21739 - DNA, 21 bp, Homo sapiens
cttccattagrcaaaaacaac

SEQ ID NO: 21740 - DNA, 21 bp, Homo sapiens
aagtgcccccmagatatcaat

SEQ ID NO: 21741 - DNA, 21 bp, Homo sapiens
aaggtagggayctgtaatacc

SEQ ID NO: 21742 - DNA, 21 bp, Homo sapiens
tcttggagagmatgtggtctt

SEQ ID NO: 21743 - DNA, 21 bp, Homo sapiens
tagtatataargacttcgcgg

SEQ ID NO: 21744 - DNA, 21 bp, Homo sapiens
tactattgaayctttatggga

SEQ ID NO: 21745 - DNA, 21 bp, Homo sapiens
gtgtatcccayaggagctgtg

SEQ ID NO: 21746 - DNA, 21 bp, Homo sapiens
aaatatttaaygtaatgggct

SEQ ID NO: 21747 - DNA, 21 bp, Homo sapiens
tggccagtacrcatttaatgc

SEQ ID NO: 21748 - DNA, 21 bp, Homo sapiens
aatcagaaaarcatgtgaaat

SEQ ID NO: 21749 - DNA, 21 bp, Homo sapiens
cattataagcygagtgctaca

SEQ ID NO: 21750 - DNA, 21 bp, Homo sapiens
ggattaaaaayatcttctcag

SEQ ID NO: 21751 - DNA, 21 bp, Homo sapiens
atgaaacaaartcttaaaatt

SEQ ID NO: 21752 - DNA, 21 bp, Homo sapiens
ggccttctaamaaataatcac

SEQ ID NO: 21753 - DNA, 21 bp, Homo sapiens
tcttcttcttmttattatttt

SEQ ID NO: 21754 - DNA, 21 bp, Homo sapiens
ctaccaatgayatgcaagtga

SEQ ID NO: 21755 - DNA, 21 bp, Homo sapiens
gaagctaatayacttgcagaa

SEQ ID NO: 21756 - DNA, 21 bp, Homo sapiens
gtactctaatytttcttccta

SEQ ID NO: 21757 - DNA, 21 bp, Homo sapiens
cactctccagmacccaatatg

SEQ ID NO: 21758 - DNA, 21 bp, Homo sapiens
cactcttttayttattactac

SEQ ID NO: 21759 - DNA, 21 bp, Homo sapiens
tccaaggagarcaggttttga

SEQ ID NO: 21760 - DNA, 21 bp, Homo sapiens
acaacttgatkttagctcagt

SEQ ID NO: 21761 - DNA, 21 bp, Homo sapiens
tcatccttccrcaatcaggaa

SEQ ID NO: 21762 - DNA, 21 bp, Homo sapiens
aaaccaatgtrgtttaggagc

SEQ ID NO: 21763 - DNA, 21 bp, Homo sapiens
actctattgtyttccacccat

SEQ ID NO: 21764 - DNA, 21 bp, Homo sapiens
atgacagtatrttgtgtagca

SEQ ID NO: 21765 - DNA, 21 bp, Homo sapiens
ctcagcaaagrtatttcacgg

SEQ ID NO: 21766 - DNA, 21 bp, Homo sapiens
tgctcagtctyctcttccact

SEQ ID NO: 21767 - DNA, 21 bp, Homo sapiens
gatactgactrcataaaacaa

SEQ ID NO: 21768 - DNA, 21 bp, Homo sapiens
agtttcagggkggcagagtta

SEQ ID NO: 21769 - DNA, 21 bp, Homo sapiens
cagacaataakgctggtattg

SEQ ID NO: 21770 - DNA, 21 bp, Homo sapiens
ctttcaggcayttctactatt

SEQ ID NO: 21771 - DNA, 21 bp, Homo sapiens
tctttgtctcrggcacaggaa

SEQ ID NO: 21772 - DNA, 21 bp, Homo sapiens
ggaatgcgggycttcacttaa

SEQ ID NO: 21773 - DNA, 21 bp, Homo sapiens
tatcaagttaytgtgttgcct

SEQ ID NO: 21774 - DNA, 21 bp, Homo sapiens
tttggcctccrttgacccaga

SEQ ID NO: 21775 - DNA, 21 bp, Homo sapiens
taattcttccraaaagtgcca

SEQ ID NO: 21776 - DNA, 21 bp, Homo sapiens
tattgctgctkcttcttatgt

SEQ ID NO: 21777 - DNA, 21 bp, Homo sapiens
tatatgttctytagtcttgaa

SEQ ID NO: 21778 - DNA, 21 bp, Homo sapiens
gaaaattgttmccaattgcca

SEQ ID NO: 21779 - DNA, 21 bp, Homo sapiens
gggctgctctmagccaatggc

SEQ ID NO: 21780 - DNA, 21 bp, Homo sapiens
ccagaggtccrcaggcagcaa

SEQ ID NO: 21781 - DNA, 21 bp, Homo sapiens
atgtacaatcyggttctgagt

SEQ ID NO: 21782 - DNA, 21 bp, Homo sapiens
atccaatgaartatagtatat

SEQ ID NO: 21783 - DNA, 21 bp, Homo sapiens
cacctgtcctyggacaaacac

SEQ ID NO: 21784 - DNA, 21 bp, Homo sapiens
gagcttgggtrataaatttag

SEQ ID NO: 21785 - DNA, 21 bp, Homo sapiens
ataacttttartatctcaatg

SEQ ID NO: 21786 - DNA, 21 bp, Homo sapiens
ctagactgttmtaaaattgcc

SEQ ID NO: 21787 - DNA, 21 bp, Homo sapiens
agctattattygcccattgca

SEQ ID NO: 21788 - DNA, 21 bp, Homo sapiens
gagaggctgaratgaaatcgg

SEQ ID NO: 21789 - DNA, 21 bp, Homo sapiens
ttcttcagaartagccattca

SEQ ID NO: 21790 - DNA, 21 bp, Homo sapiens
gagaagttatyttatacattt

SEQ ID NO: 21791 - DNA, 21 bp, Homo sapiens
actgatttgtrtgtttgggca

SEQ ID NO: 21792 - DNA, 21 bp, Homo sapiens
atcctgcttgyagttccacgt

SEQ ID NO: 21793 - DNA, 21 bp, Homo sapiens
cttattgtacrtagacagttc

SEQ ID NO: 21794 - DNA, 21 bp, Homo sapiens
cacaagaatarttgcagctct

SEQ ID NO: 21795 - DNA, 21 bp, Homo sapiens
tcttcatataytctggatagt

SEQ ID NO: 21796 - DNA, 21 bp, Homo sapiens
tgtaatgtgtrtcaagatgtg

SEQ ID NO: 21797 - DNA, 21 bp, Homo sapiens
cacttgactarcttacatatg

SEQ ID NO: 21798 - DNA, 21 bp, Homo sapiens
ttgaaatgtaraccatgtcct

SEQ ID NO: 21799 - DNA, 21 bp, Homo sapiens
gatgctacttyctctgatgtt

SEQ ID NO: 21800 - DNA, 21 bp, Homo sapiens
atctttatagyctttcttcat

SEQ ID NO: 21801 - DNA, 21 bp, Homo sapiens
ccacgctttaytagacttact

SEQ ID NO: 21802 - DNA, 21 bp, Homo sapiens
agagagagggytaaagtatcc

SEQ ID NO: 21803 - DNA, 21 bp, Homo sapiens
ttcactttgcyctctgtctat

SEQ ID NO: 21804 - DNA, 21 bp, Homo sapiens
tatctcatacygtattcagaa

SEQ ID NO: 21805 - DNA, 21 bp, Homo sapiens
agctagagaakagagagtatt

SEQ ID NO: 21806 - DNA, 21 bp, Homo sapiens
gagttgcaacytggagtcaag

SEQ ID NO: 21807 - DNA, 21 bp, Homo sapiens
taccatttatktattgaacac

SEQ ID NO: 21808 - DNA, 21 bp, Homo sapiens
gccttgatgayagaggaagtt

SEQ ID NO: 21809 - DNA, 21 bp, Homo sapiens
agaggcaagakaatgtagatg

SEQ ID NO: 21810 - DNA, 21 bp, Homo sapiens
gtaaggacagyaatgttgcaa

SEQ ID NO: 21811 - DNA, 21 bp, Homo sapiens
catccttcttyctatatgatc

SEQ ID NO: 21812 - DNA, 21 bp, Homo sapiens
gtttttttcarcacttaaggt

SEQ ID NO: 21813 - DNA, 21 bp, Homo sapiens
tgtcacacgcygcaataagca

SEQ ID NO: 21814 - DNA, 21 bp, Homo sapiens
agtgtaactcragtgaaatcc

SEQ ID NO: 21815 - DNA, 21 bp, Homo sapiens
ttggtcatackccttagttct

SEQ ID NO: 21816 - DNA, 21 bp, Homo sapiens
gctagaaacaygtaatggcca

SEQ ID NO: 21817 - DNA, 21 bp, Homo sapiens
tcataaagagrtctccattat

SEQ ID NO: 21818 - DNA, 21 bp, Homo sapiens
aagagagagcmttctaagaag

SEQ ID NO: 21819 - DNA, 21 bp, Homo sapiens
ggaatgtgttkaccacatgca

SEQ ID NO: 21820 - DNA, 21 bp, Homo sapiens
tgaagttattmctgtttcttg

SEQ ID NO: 21821 - DNA, 21 bp, Homo sapiens
gccatgctgcytctatagacg

SEQ ID NO: 21822 - DNA, 21 bp, Homo sapiens
accctttgcakttaatttaaa

SEQ ID NO: 21823 - DNA, 21 bp, Homo sapiens
cccatggtgtycttgttaata

SEQ ID NO: 21824 - DNA, 21 bp, Homo sapiens
tctttatcctygaaatttgaa

SEQ ID NO: 21825 - DNA, 21 bp, Homo sapiens
taagtatcaayatatttctcc

SEQ ID NO: 21826 - DNA, 21 bp, Homo sapiens
ggagttaaggrtatatgaagt

SEQ ID NO: 21827 - DNA, 21 bp, Homo sapiens
tgcccaacctrgtgctgtggg

SEQ ID NO: 21828 - DNA, 21 bp, Homo sapiens
ccctgaccttktcttctaatt

SEQ ID NO: 21829 - DNA, 21 bp, Homo sapiens
aaaacaacaakaagaagaaga

SEQ ID NO: 21830 - DNA, 21 bp, Homo sapiens
caccatacctytgccatgtgg

SEQ ID NO: 21831 - DNA, 21 bp, Homo sapiens
ttattttttcrtgtggcagag

SEQ ID NO: 21832 - DNA, 21 bp, Homo sapiens
ctagatttccragtatgccaa

SEQ ID NO: 21833 - DNA, 21 bp, Homo sapiens
gacatgtatayaatattgagt

SEQ ID NO: 21834 - DNA, 21 bp, Homo sapiens
tggcataagargtgctggcaa

SEQ ID NO: 21835 - DNA, 21 bp, Homo sapiens
tccactccctratctagagct

SEQ ID NO: 21836 - DNA, 21 bp, Homo sapiens
ttcatcttaaytttaacattt

SEQ ID NO: 21837 - DNA, 21 bp, Homo sapiens
tatccaatatyggcatatatc

SEQ ID NO: 21838 - DNA, 21 bp, Homo sapiens
attgaaaaaakcttggtttat

SEQ ID NO: 21839 - DNA, 21 bp, Homo sapiens
tgttaaatcaygaatgatgaa

SEQ ID NO: 21840 - DNA, 21 bp, Homo sapiens
cggattaatgrtagttccaat

SEQ ID NO: 21841 - DNA, 21 bp, Homo sapiens
ttaaatattcrggatttagca

SEQ ID NO: 21842 - DNA, 21 bp, Homo sapiens
taaaacatttmggtatgtcca

SEQ ID NO: 21843 - DNA, 21 bp, Homo sapiens
tcattcctccyctcatttgcc

SEQ ID NO: 21844 - DNA, 21 bp, Homo sapiens
attagagagayggaaagctta

SEQ ID NO: 21845 - DNA, 21 bp, Homo sapiens
aataaatgttyggcattgggt

SEQ ID NO: 21846 - DNA, 21 bp, Homo sapiens
catgccatgcygtgaaaatta

SEQ ID NO: 21847 - DNA, 21 bp, Homo sapiens
tatgatttaamtgtttcattg

SEQ ID NO: 21848 - DNA, 21 bp, Homo sapiens
atttatctgtyttgcaatttt

SEQ ID NO: 21849 - DNA, 21 bp, Homo sapiens
agattttgttygtgtgattcc

SEQ ID NO: 21850 - DNA, 21 bp, Homo sapiens
ccctttctttygtcatcttct

SEQ ID NO: 21851 - DNA, 21 bp, Homo sapiens
aaaactcttayaatctccaga

SEQ ID NO: 21852 - DNA, 21 bp, Homo sapiens
aaatgtttcargaagcgtggc

SEQ ID NO: 21853 - DNA, 21 bp, Homo sapiens
gagaattagtraacataggaa

SEQ ID NO: 21854 - DNA, 21 bp, Homo sapiens
ctaacgtcccrttctcccatc

SEQ ID NO: 21855 - DNA, 21 bp, Homo sapiens
gacataaatartggaaagaag

SEQ ID NO: 21856 - DNA, 21 bp, Homo sapiens
acgtgaaagcrgttggtttgc

SEQ ID NO: 21857 - DNA, 21 bp, Homo sapiens
cactcatctcycagtcctcct

SEQ ID NO: 21858 - DNA, 21 bp, Homo sapiens
atggtcctaaygttatctccc

SEQ ID NO: 21859 - DNA, 21 bp, Homo sapiens
aaaattggccycaggatatgg

SEQ ID NO: 21860 - DNA, 21 bp, Homo sapiens
ctcactttatrtttttcctcc

SEQ ID NO: 21861 - DNA, 21 bp, Homo sapiens
ctagataatgraactaagaac

SEQ ID NO: 21862 - DNA, 21 bp, Homo sapiens
aattacagtcratgaataaag

SEQ ID NO: 21863 - DNA, 21 bp, Homo sapiens
gaattacactractactgtgg

SEQ ID NO: 21864 - DNA, 21 bp, Homo sapiens
ttctgttttgytctctctcag

SEQ ID NO: 21865 - DNA, 21 bp, Homo sapiens
gttttgataayacagttaagc

SEQ ID NO: 21866 - DNA, 21 bp, Homo sapiens
aaatattatgygccagcactc

SEQ ID NO: 21867 - DNA, 21 bp, Homo sapiens
ccgtaacagcracagcttttg

SEQ ID NO: 21868 - DNA, 21 bp, Homo sapiens
tttgtcaatcmacattttatg

SEQ ID NO: 21869 - DNA, 21 bp, Homo sapiens
gcaattttatkgtctccatgt

SEQ ID NO: 21870 - DNA, 21 bp, Homo sapiens
gaactcctttytgtatacttt

SEQ ID NO: 21871 - DNA, 21 bp, Homo sapiens
tagttttatartgacatccag

SEQ ID NO: 21872 - DNA, 21 bp, Homo sapiens
atagcatagamtattactgaa

SEQ ID NO: 21873 - DNA, 21 bp, Homo sapiens
acaacactatyggagaaagaa

SEQ ID NO: 21874 - DNA, 21 bp, Homo sapiens
aagattaatcygtgttaaagc

SEQ ID NO: 21875 - DNA, 21 bp, Homo sapiens
actacagcaaygccatgggag

SEQ ID NO: 21876 - DNA, 21 bp, Homo sapiens
ttcttttaaamctccaacaca

SEQ ID NO: 21877 - DNA, 21 bp, Homo sapiens
ctgataaatgrgaaaacatgt

SEQ ID NO: 21878 - DNA, 21 bp, Homo sapiens
taagatatttkgaccccagtt

SEQ ID NO: 21879 - DNA, 21 bp, Homo sapiens
tgtctgggcaycccttaacct

SEQ ID NO: 21880 - DNA, 21 bp, Homo sapiens
tgccttttcaktttcataaca

SEQ ID NO: 21881 - DNA, 21 bp, Homo sapiens
gtgtttttctrtaagtacatt

SEQ ID NO: 21882 - DNA, 21 bp, Homo sapiens
tgtacaaatcrcaagtcctga

SEQ ID NO: 21883 - DNA, 21 bp, Homo sapiens
tacccaggaakttacctgtgt

SEQ ID NO: 21884 - DNA, 21 bp, Homo sapiens
actcaatgtcrtagagaaaag

SEQ ID NO: 21885 - DNA, 21 bp, Homo sapiens
ttgtagtatgrcgtttactag

SEQ ID NO: 21886 - DNA, 21 bp, Homo sapiens
ctaatgcatcrgttggcagtc

SEQ ID NO: 21887 - DNA, 21 bp, Homo sapiens
ttttattataytttggcatcc

SEQ ID NO: 21888 - DNA, 21 bp, Homo sapiens
cttagtaaaargattgctttt

SEQ ID NO: 21889 - DNA, 21 bp, Homo sapiens
aattcctctaygctgcagcct

SEQ ID NO: 21890 - DNA, 21 bp, Homo sapiens
tgtccccaagmaatatgtggc

SEQ ID NO: 21891 - DNA, 21 bp, Homo sapiens
gtattttgctyaacattgcat

SEQ ID NO: 21892 - DNA, 21 bp, Homo sapiens
tcccacctctrcttggcagtg

SEQ ID NO: 21893 - DNA, 21 bp, Homo sapiens
tgatcttgcgyattgtttctg

SEQ ID NO: 21894 - DNA, 21 bp, Homo sapiens
tttgttttttkggggcatcat

SEQ ID NO: 21895 - DNA, 21 bp, Homo sapiens
tcataaggctraaattgctat

SEQ ID NO: 21896 - DNA, 21 bp, Homo sapiens
gtttagtgatrtcaatattcc

SEQ ID NO: 21897 - DNA, 21 bp, Homo sapiens
aaattttagcrcaacctaaac

SEQ ID NO: 21898 - DNA, 21 bp, Homo sapiens
tagttctaaarcctaaatata

SEQ ID NO: 21899 - DNA, 21 bp, Homo sapiens
aaattcatgaygcacctcaag

SEQ ID NO: 21900 - DNA, 21 bp, Homo sapiens
ggtatgctgarctccagaaga

SEQ ID NO: 21901 - DNA, 21 bp, Homo sapiens
tgagttgtttyctcaggttag

SEQ ID NO: 21902 - DNA, 21 bp, Homo sapiens
aaataagccayattttgatca

SEQ ID NO: 21903 - DNA, 21 bp, Homo sapiens
ttcctccctcytcatatcccc

SEQ ID NO: 21904 - DNA, 21 bp, Homo sapiens
ctccaacatayttatttacat

SEQ ID NO: 21905 - DNA, 21 bp, Homo sapiens
tcacataatgmtccacttctg

SEQ ID NO: 21906 - DNA, 21 bp, Homo sapiens
tgcccttattkgtcaagggta

SEQ ID NO: 21907 - DNA, 21 bp, Homo sapiens
tgtcaacatgytgttactcag

SEQ ID NO: 21908 - DNA, 21 bp, Homo sapiens
attgtcttttytatgacctct

SEQ ID NO: 21909 - DNA, 21 bp, Homo sapiens
gagatggtggygtgaaaatga

SEQ ID NO: 21910 - DNA, 21 bp, Homo sapiens
ccagcaggggkttgagccagg

SEQ ID NO: 21911 - DNA, 21 bp, Homo sapiens
taatttatccrgccatatata

SEQ ID NO: 21912 - DNA, 21 bp, Homo sapiens
acagcatatgmtctttacaaa

SEQ ID NO: 21913 - DNA, 21 bp, Homo sapiens
cctctccctcygtactcatct

SEQ ID NO: 21914 - DNA, 21 bp, Homo sapiens
tcctttccccrttgtatgtcc

SEQ ID NO: 21915 - DNA, 21 bp, Homo sapiens
gtaatttaatrtctgcgtttc

SEQ ID NO: 21916 - DNA, 21 bp, Homo sapiens
gaactttctargtactagaag

SEQ ID NO: 21917 - DNA, 21 bp, Homo sapiens
cagctaatttkcttaaagtct

SEQ ID NO: 21918 - DNA, 21 bp, Homo sapiens
acaaacttagkctgctcacaa

SEQ ID NO: 21919 - DNA, 21 bp, Homo sapiens
tgttatattcmtttttatttt

SEQ ID NO: 21920 - DNA, 21 bp, Homo sapiens
tcttgcccagytctaatagaa

SEQ ID NO: 21921 - DNA, 21 bp, Homo sapiens
agtaaggagaygctatagatt

SEQ ID NO: 21922 - DNA, 21 bp, Homo sapiens
tcctagatcakctatttttac

SEQ ID NO: 21923 - DNA, 21 bp, Homo sapiens
acaagttgttytttcagtgtg

SEQ ID NO: 21924 - DNA, 21 bp, Homo sapiens
gaccgcttggrtgttcttgat

SEQ ID NO: 21925 - DNA, 21 bp, Homo sapiens
tactctcttcrttgcaaaaga

SEQ ID NO: 21926 - DNA, 21 bp, Homo sapiens
tgttggaattyaaaggtcaag

SEQ ID NO: 21927 - DNA, 21 bp, Homo sapiens
ttagctagaartgcttttttt

SEQ ID NO: 21928 - DNA, 21 bp, Homo sapiens
attaatgcatygaactattga

SEQ ID NO: 21929 - DNA, 21 bp, Homo sapiens
aattaatctayaaatttagtg

SEQ ID NO: 21930 - DNA, 21 bp, Homo sapiens
cagtttgattmacagtgggca

SEQ ID NO: 21931 - DNA, 21 bp, Homo sapiens
tttatgatgaygtatgataga

SEQ ID NO: 21932 - DNA, 21 bp, Homo sapiens
atacacctggktataggttac

SEQ ID NO: 21933 - DNA, 21 bp, Homo sapiens
cttaaataatyatggtgggtg

SEQ ID NO: 21934 - DNA, 21 bp, Homo sapiens
actcaaaggcmcatgtggcta

SEQ ID NO: 21935 - DNA, 21 bp, Homo sapiens
ttacttctaaratttctacct

SEQ ID NO: 21936 - DNA, 21 bp, Homo sapiens
acacagaacartcagtggcat

SEQ ID NO: 21937 - DNA, 21 bp, Homo sapiens
taagaaatgayggcagttcta

SEQ ID NO: 21938 - DNA, 21 bp, Homo sapiens
taagtgtttgytgtttgattg

SEQ ID NO: 21939 - DNA, 21 bp, Homo sapiens
gagagtttagrttacaggaga

SEQ ID NO: 21940 - DNA, 21 bp, Homo sapiens
aagaatctagyggtataaatt

SEQ ID NO: 21941 - DNA, 21 bp, Homo sapiens
tgttccagccmcagcttcctc

SEQ ID NO: 21942 - DNA, 21 bp, Homo sapiens
ttagtaggacraagatactac

SEQ ID NO: 21943 - DNA, 21 bp, Homo sapiens
gctttgaatartggaaagtga

SEQ ID NO: 21944 - DNA, 21 bp, Homo sapiens
ttatctcttcracatgaagat

SEQ ID NO: 21945 - DNA, 21 bp, Homo sapiens
agcttttgggmaataactaac

SEQ ID NO: 21946 - DNA, 21 bp, Homo sapiens
taatatcctgyttctttttct

SEQ ID NO: 21947 - DNA, 21 bp, Homo sapiens
aaactgaaaamccggagcgca

SEQ ID NO: 21948 - DNA, 21 bp, Homo sapiens
cttcggtgccrcatcacaaag

SEQ ID NO: 21949 - DNA, 21 bp, Homo sapiens
tggctggaacmctgaagatgt

SEQ ID NO: 21950 - DNA, 21 bp, Homo sapiens
gaccagcttcytgcactctaa

SEQ ID NO: 21951 - DNA, 21 bp, Homo sapiens
cccagggataygagagagaag

SEQ ID NO: 21952 - DNA, 21 bp, Homo sapiens
agttgaaggcrtttgcttacc

SEQ ID NO: 21953 - DNA, 21 bp, Homo sapiens
atttgattctmtttttgactc

SEQ ID NO: 21954 - DNA, 21 bp, Homo sapiens
cttaaactccrctaaagagca

SEQ ID NO: 21955 - DNA, 21 bp, Homo sapiens
cagggtggacrtcggtacttc

SEQ ID NO: 21956 - DNA, 21 bp, Homo sapiens
atttgccaggyccacacttgg

SEQ ID NO: 21957 - DNA, 21 bp, Homo sapiens
aagattattcyaataaacaaa

SEQ ID NO: 21958 - DNA, 21 bp, Homo sapiens
agattcgaaamtgcatggcag

SEQ ID NO: 21959 - DNA, 21 bp, Homo sapiens
agtggtcgccyctcgtcaagg

SEQ ID NO: 21960 - DNA, 21 bp, Homo sapiens
ttaaagtacaracttgcgcta

SEQ ID NO: 21961 - DNA, 21 bp, Homo sapiens
tggttgagacktgcacgttgc

SEQ ID NO: 21962 - DNA, 21 bp, Homo sapiens
tgaaggagagrcccagagttc

SEQ ID NO: 21963 - DNA, 21 bp, Homo sapiens
caaaaggaggmggcgagattg

SEQ ID NO: 21964 - DNA, 21 bp, Homo sapiens
gaaactatacrtatctacata

SEQ ID NO: 21965 - DNA, 21 bp, Homo sapiens
tgagaagcctygtatactgct

SEQ ID NO: 21966 - DNA, 21 bp, Homo sapiens
tgggtttttcycaaacattga

SEQ ID NO: 21967 - DNA, 21 bp, Homo sapiens
catggcaaccyatttagaggc

SEQ ID NO: 21968 - DNA, 21 bp, Homo sapiens
tttgcaaagtyatctgcatgg

SEQ ID NO: 21969 - DNA, 21 bp, Homo sapiens
ttaagggatgytgggactcag

SEQ ID NO: 21970 - DNA, 21 bp, Homo sapiens
ccctcaccatmctctctcttt

SEQ ID NO: 21971 - DNA, 21 bp, Homo sapiens
gcacccgaagrtcagaaggga

SEQ ID NO: 21972 - DNA, 21 bp, Homo sapiens
ctcaggtgagrgcggagaagt

SEQ ID NO: 21973 - DNA, 21 bp, Homo sapiens
cttctagcctrtagcatttaa

SEQ ID NO: 21974 - DNA, 21 bp, Homo sapiens
cttctcccagycctggggcaa

SEQ ID NO: 21975 - DNA, 21 bp, Homo sapiens
caatctgtgtkgtgcagtagc

SEQ ID NO: 21976 - DNA, 21 bp, Homo sapiens
cagggtgggtmcctggtcacc

SEQ ID NO: 21977 - DNA, 21 bp, Homo sapiens
tggaaaccctkaagttcggct

SEQ ID NO: 21978 - DNA, 21 bp, Homo sapiens
tcgggggatgkgctccaggac

SEQ ID NO: 21979 - DNA, 21 bp, Homo sapiens
tcccacctgcytggctctcca

SEQ ID NO: 21980 - DNA, 21 bp, Homo sapiens
ttaaagggacygtgcgcatta

SEQ ID NO: 21981 - DNA, 21 bp, Homo sapiens
cctcagtcagmcttctgttga

SEQ ID NO: 21982 - DNA, 21 bp, Homo sapiens
ctgtggggccygggctgcccc

SEQ ID NO: 21983 - DNA, 21 bp, Homo sapiens
cagccactccyaaaaggggtg

SEQ ID NO: 21984 - DNA, 21 bp, Homo sapiens
gctgggtgccyggctcaaact

SEQ ID NO: 21985 - DNA, 21 bp, Homo sapiens
acgctcaccaygcagggcctg

SEQ ID NO: 21986 - DNA, 21 bp, Homo sapiens
gccccagtgcygagggacagg

SEQ ID NO: 21987 - DNA, 21 bp, Homo sapiens
gaaacccagaycggctcaaga

SEQ ID NO: 21988 - DNA, 21 bp, Homo sapiens
tggaaatggamtctgcccaca

SEQ ID NO: 21989 - DNA, 21 bp, Homo sapiens
ggaagatgccrttggcaaact

SEQ ID NO: 21990 - DNA, 21 bp, Homo sapiens
aaggcagaccrccacacaaca

SEQ ID NO: 21991 - DNA, 21 bp, Homo sapiens
caggggccttyaattttattt

SEQ ID NO: 21992 - DNA, 21 bp, Homo sapiens
accccagactytccactacgt

SEQ ID NO: 21993 - DNA, 21 bp, Homo sapiens
tatctccaaargggccttgga

SEQ ID NO: 21994 - DNA, 21 bp, Homo sapiens
ccccgaccggygtgggtgcca

SEQ ID NO: 21995 - DNA, 21 bp, Homo sapiens
cctgggcagcrggttccgggc

SEQ ID NO: 21996 - DNA, 21 bp, Homo sapiens
taagtctgaaratgggtcagt

SEQ ID NO: 21997 - DNA, 21 bp, Homo sapiens
aggacgctacrctcagtgaga

SEQ ID NO: 21998 - DNA, 21 bp, Homo sapiens
aggaagaagcrcaggcttggg

SEQ ID NO: 21999 - DNA, 21 bp, Homo sapiens
gggaagtgacrgccacacagc

SEQ ID NO: 22000 - DNA, 21 bp, Homo sapiens
ccctgagtccyggggaaagtc

SEQ ID NO: 22001 - DNA, 21 bp, Homo sapiens
caggacccccrccggggcttt

SEQ ID NO: 22002 - DNA, 21 bp, Homo sapiens
cagagtgagamtctgtctcaa

SEQ ID NO: 22003 - DNA, 21 bp, Homo sapiens
tgggagggccygcacctggac

SEQ ID NO: 22004 - DNA, 21 bp, Homo sapiens
gcaacctctgrgggaattgtc

SEQ ID NO: 22005 - DNA, 21 bp, Homo sapiens
gcacatagttrttgaactgcc

SEQ ID NO: 22006 - DNA, 21 bp, Homo sapiens
cgttaaaacayacttcctata

SEQ ID NO: 22007 - DNA, 21 bp, Homo sapiens
catgcataggraattgtctag

SEQ ID NO: 22008 - DNA, 21 bp, Homo sapiens
cctgtctccakgactcagaat

SEQ ID NO: 22009 - DNA, 21 bp, Homo sapiens
gtggttctccrgtgtgtgtct

SEQ ID NO: 22010 - DNA, 21 bp, Homo sapiens
atgtcaccacrtgggcttctg

SEQ ID NO: 22011 - DNA, 21 bp, Homo sapiens
ctgacttgccratattaaatt

SEQ ID NO: 22012 - DNA, 21 bp, Homo sapiens
tatgttaagtrgaataagtca

SEQ ID NO: 22013 - DNA, 21 bp, Homo sapiens
tatgatttcaktaaactttaa

SEQ ID NO: 22014 - DNA, 21 bp, Homo sapiens
tagatttttaycatatttcct

SEQ ID NO: 22015 - DNA, 21 bp, Homo sapiens
tctttactttktgtgtgtgtg

SEQ ID NO: 22016 - DNA, 21 bp, Homo sapiens
gcaaaaattcrtggctgaatc

SEQ ID NO: 22017 - DNA, 21 bp, Homo sapiens
taaatcaccartttcatcata

SEQ ID NO: 22018 - DNA, 21 bp, Homo sapiens
ggaatgaaagygggatatgta

SEQ ID NO: 22019 - DNA, 21 bp, Homo sapiens
accccaccagycctcactggg

SEQ ID NO: 22020 - DNA, 21 bp, Homo sapiens
ccctttgagtmgtaagaagat

SEQ ID NO: 22021 - DNA, 21 bp, Homo sapiens
gagaaactccrcacgtttcaa

SEQ ID NO: 22022 - DNA, 21 bp, Homo sapiens
tctcttacggkacacaacctc

SEQ ID NO: 22023 - DNA, 21 bp, Homo sapiens
gaatgcttacmattttatgtt

SEQ ID NO: 22024 - DNA, 21 bp, Homo sapiens
acctcagaggktttatctgag

SEQ ID NO: 22025 - DNA, 21 bp, Homo sapiens
gtggacatttytaatttcttc

SEQ ID NO: 22026 - DNA, 21 bp, Homo sapiens
ttaggtgttcygacaccttca

SEQ ID NO: 22027 - DNA, 21 bp, Homo sapiens
agtttctgtcycagtaggtct

SEQ ID NO: 22028 - DNA, 21 bp, Homo sapiens
gtaactgagaygtctcagaat

SEQ ID NO: 22029 - DNA, 21 bp, Homo sapiens
ggcataaacayggtaagactt

SEQ ID NO: 22030 - DNA, 21 bp, Homo sapiens
gtcatctttayatcccacaac

SEQ ID NO: 22031 - DNA, 21 bp, Homo sapiens
tcagtgaactyaaagataggt

SEQ ID NO: 22032 - DNA, 21 bp, Homo sapiens
attagcatcarggggtccaac

SEQ ID NO: 22033 - DNA, 21 bp, Homo sapiens
cagacaacacrggacaggaca

SEQ ID NO: 22034 - DNA, 21 bp, Homo sapiens
tggtttgttckctcacatcct

SEQ ID NO: 22035 - DNA, 21 bp, Homo sapiens
agacacacacrctcacacgtg

SEQ ID NO: 22036 - DNA, 21 bp, Homo sapiens
gtctctacgtytctgtctctc

SEQ ID NO: 22037 - DNA, 21 bp, Homo sapiens
ctggcacacaygagtaaggat

SEQ ID NO: 22038 - DNA, 21 bp, Homo sapiens
tcagggttccrttttccccac

SEQ ID NO: 22039 - DNA, 21 bp, Homo sapiens
aagcttgggaratgctttggg

SEQ ID NO: 22040 - DNA, 21 bp, Homo sapiens
tcagtctttargagacagagt

SEQ ID NO: 22041 - DNA, 21 bp, Homo sapiens
cagggcgaggygcatgtgggc

SEQ ID NO: 22042 - DNA, 21 bp, Homo sapiens
caaatcccatrgggccctggg

SEQ ID NO: 22043 - DNA, 21 bp, Homo sapiens
ggtctgggttytggggctgca

SEQ ID NO: 22044 - DNA, 21 bp, Homo sapiens
ggttcaggccrgggggctcca

SEQ ID NO: 22045 - DNA, 21 bp, Homo sapiens
ggaggctcaaygataatgggt

SEQ ID NO: 22046 - DNA, 21 bp, Homo sapiens
gaatctggccrgcgttaagat

SEQ ID NO: 22047 - DNA, 21 bp, Homo sapiens
ttctcataggyggaatttcca

SEQ ID NO: 22048 - DNA, 21 bp, Homo sapiens
ttgacaagaayagaaaacaca

SEQ ID NO: 22049 - DNA, 21 bp, Homo sapiens
ttctgaaatakgaaccatgtg

SEQ ID NO: 22050 - DNA, 21 bp, Homo sapiens
gtaaagttttrtttttgagtt

SEQ ID NO: 22051 - DNA, 21 bp, Homo sapiens
cctcctccccrcctgtccccc

SEQ ID NO: 22052 - DNA, 21 bp, Homo sapiens
catttactatycatttatcta

SEQ ID NO: 22053 - DNA, 21 bp, Homo sapiens
gcagagagagmgcttctcttt

SEQ ID NO: 22054 - DNA, 21 bp, Homo sapiens
tgagttgtagmtatgtgtgtg

SEQ ID NO: 22055 - DNA, 21 bp, Homo sapiens
tgtaaacaaargacagcaaag

SEQ ID NO: 22056 - DNA, 21 bp, Homo sapiens
taagaactgamctttctggaa

SEQ ID NO: 22057 - DNA, 21 bp, Homo sapiens
acagaaaggarccctgtaaac

SEQ ID NO: 22058 - DNA, 21 bp, Homo sapiens
ctggtcaggcytcccgtctgt

SEQ ID NO: 22059 - DNA, 21 bp, Homo sapiens
gtttggtgatkctctttcatg

SEQ ID NO: 22060 - DNA, 21 bp, Homo sapiens
acttgactgcygcccctaagc

SEQ ID NO: 22061 - DNA, 21 bp, Homo sapiens
aacgtgctacraagttaggga

SEQ ID NO: 22062 - DNA, 21 bp, Homo sapiens
agatagagaargtgcggataa

SEQ ID NO: 22063 - DNA, 21 bp, Homo sapiens
gggtgagtcakagaacagagt

SEQ ID NO: 22064 - DNA, 21 bp, Homo sapiens
ctgaagtttgyacgtgggcca

SEQ ID NO: 22065 - DNA, 21 bp, Homo sapiens
agagccagacygcgcctggac

SEQ ID NO: 22066 - DNA, 21 bp, Homo sapiens
accacagtccycgccccctac

SEQ ID NO: 22067 - DNA, 21 bp, Homo sapiens
aacccaggctrtttatagaga

SEQ ID NO: 22068 - DNA, 21 bp, Homo sapiens
agaggtcttcytggacctttg

SEQ ID NO: 22069 - DNA, 21 bp, Homo sapiens
tgagctcagcraggaagggaa

SEQ ID NO: 22070 - DNA, 21 bp, Homo sapiens
cttggataatyctctggcatc

SEQ ID NO: 22071 - DNA, 21 bp, Homo sapiens
gaggattattytctacttttc

SEQ ID NO: 22072 - DNA, 21 bp, Homo sapiens
ttgtggcaaarccttcaactg

SEQ ID NO: 22073 - DNA, 21 bp, Homo sapiens
aaatccatacmtttctgagtc

SEQ ID NO: 22074 - DNA, 21 bp, Homo sapiens
ggctattcagrgtctttcgtg

SEQ ID NO: 22075 - DNA, 21 bp, Homo sapiens
ggtagaagctrcatttgcata

SEQ ID NO: 22076 - DNA, 21 bp, Homo sapiens
cgcaagttctyctccatactt

SEQ ID NO: 22077 - DNA, 21 bp, Homo sapiens
aaattgtggargtaataaata

SEQ ID NO: 22078 - DNA, 21 bp, Homo sapiens
gaaacctttayggtatattag

SEQ ID NO: 22079 - DNA, 21 bp, Homo sapiens
actgtgtccaytactctcagt

SEQ ID NO: 22080 - DNA, 21 bp, Homo sapiens
aaataggtgayttcagttcca

SEQ ID NO: 22081 - DNA, 21 bp, Homo sapiens
agtttcttacrcattcactta

SEQ ID NO: 22082 - DNA, 21 bp, Homo sapiens
ttgaagaaaayagctgtctac

SEQ ID NO: 22083 - DNA, 21 bp, Homo sapiens
ttcagactgarttattttatc

SEQ ID NO: 22084 - DNA, 21 bp, Homo sapiens
aacaaagcaaracacaaaaac

SEQ ID NO: 22085 - DNA, 21 bp, Homo sapiens
accattgtaaytctgccttga

SEQ ID NO: 22086 - DNA, 21 bp, Homo sapiens
aaaagaattayctcaattggt

SEQ ID NO: 22087 - DNA, 21 bp, Homo sapiens
gggcctgacayctgggggatg

SEQ ID NO: 22088 - DNA, 21 bp, Homo sapiens
gcctgtcagakcaacattcaa

SEQ ID NO: 22089 - DNA, 21 bp, Homo sapiens
ctcctctgcayaaatgttata

SEQ ID NO: 22090 - DNA, 21 bp, Homo sapiens
ccatctttccytctttgtgac

SEQ ID NO: 22091 - DNA, 21 bp, Homo sapiens
taacatgtctytggatgcacc

SEQ ID NO: 22092 - DNA, 21 bp, Homo sapiens
ggactctccarctacaaaagt

SEQ ID NO: 22093 - DNA, 21 bp, Homo sapiens
acctctcagayatgctgaaac

SEQ ID NO: 22094 - DNA, 21 bp, Homo sapiens
acccagttacrgagcctagta

SEQ ID NO: 22095 - DNA, 21 bp, Homo sapiens
gccctcctccrcatacagtct

SEQ ID NO: 22096 - DNA, 21 bp, Homo sapiens
agacttggggyttaacagaca

SEQ ID NO: 22097 - DNA, 21 bp, Homo sapiens
tttctaacgartaatttttat

SEQ ID NO: 22098 - DNA, 21 bp, Homo sapiens
ggttgagtccrtttgaccctg

SEQ ID NO: 22099 - DNA, 21 bp, Homo sapiens
acttttccctmccctctttga

SEQ ID NO: 22100 - DNA, 21 bp, Homo sapiens
attgataatayagaatgaacg

SEQ ID NO: 22101 - DNA, 21 bp, Homo sapiens
gtcttgtttcrgaagcagtcc

SEQ ID NO: 22102 - DNA, 21 bp, Homo sapiens
ttcaatatctyctcctgatga

SEQ ID NO: 22103 - DNA, 21 bp, Homo sapiens
tgttgtggtcrgttggtctgt

SEQ ID NO: 22104 - DNA, 21 bp, Homo sapiens
cctagtttgtragtgcacaat

SEQ ID NO: 22105 - DNA, 21 bp, Homo sapiens
tcagcgctcaygctagccccc

SEQ ID NO: 22106 - DNA, 21 bp, Homo sapiens
tcccttacccycaagctccat

SEQ ID NO: 22107 - DNA, 21 bp, Homo sapiens
caccctctccrcctgctgccc

SEQ ID NO: 22108 - DNA, 21 bp, Homo sapiens
actataattaytcacattcta

SEQ ID NO: 22109 - DNA, 21 bp, Homo sapiens
agaagctgcaygtccctcctc

SEQ ID NO: 22110 - DNA, 21 bp, Homo sapiens
attgcccagayccgggagcaa

SEQ ID NO: 22111 - DNA, 21 bp, Homo sapiens
ggtctatatgytgaaacagca

SEQ ID NO: 22112 - DNA, 21 bp, Homo sapiens
atacatgggamtgggaatatc

SEQ ID NO: 22113 - DNA, 21 bp, Homo sapiens
tgcacttagtrggaccatctc

SEQ ID NO: 22114 - DNA, 21 bp, Homo sapiens
ccaagcaccaytgtggccagg

SEQ ID NO: 22115 - DNA, 21 bp, Homo sapiens
agcatctgctrcgccaaagcc

SEQ ID NO: 22116 - DNA, 21 bp, Homo sapiens
tcatgggccaygttaaggcgc

SEQ ID NO: 22117 - DNA, 21 bp, Homo sapiens
gatcagtagcktgggtcaagt

SEQ ID NO: 22118 - DNA, 21 bp, Homo sapiens
ttatttgagayggagtctcac

SEQ ID NO: 22119 - DNA, 21 bp, Homo sapiens
cacacacacayatatatagaa

SEQ ID NO: 22120 - DNA, 21 bp, Homo sapiens
tcgtaaaaaarctgagataac

SEQ ID NO: 22121 - DNA, 21 bp, Homo sapiens
aggttaagtgrcctgcacaag

SEQ ID NO: 22122 - DNA, 21 bp, Homo sapiens
atgcaatataygtatgtaaga

SEQ ID NO: 22123 - DNA, 21 bp, Homo sapiens
ggagtggacgraggtagaagg

SEQ ID NO: 22124 - DNA, 21 bp, Homo sapiens
gacacacatcrtaagcatgag

SEQ ID NO: 22125 - DNA, 21 bp, Homo sapiens
ggcaatttggrgtctccggga

SEQ ID NO: 22126 - DNA, 21 bp, Homo sapiens
gaaaacagacmcctcttcagg

SEQ ID NO: 22127 - DNA, 21 bp, Homo sapiens
ctctagaaatyccgtctcaag

SEQ ID NO: 22128 - DNA, 21 bp, Homo sapiens
acctgcctgcragtttccctc

SEQ ID NO: 22129 - DNA, 21 bp, Homo sapiens
actctccctamccccccaccc

SEQ ID NO: 22130 - DNA, 21 bp, Homo sapiens
gcagggcctgyggtgagactg

SEQ ID NO: 22131 - DNA, 21 bp, Homo sapiens
cactcctgccragagagtatc

SEQ ID NO: 22132 - DNA, 21 bp, Homo sapiens
tgcaggcagarccattcaccc

SEQ ID NO: 22133 - DNA, 21 bp, Homo sapiens
agagaagttcrtcccggggcc

SEQ ID NO: 22134 - DNA, 21 bp, Homo sapiens
tgtcctctctrtagcaatgga

SEQ ID NO: 22135 - DNA, 21 bp, Homo sapiens
acagcacccarggctgagaac

SEQ ID NO: 22136 - DNA, 21 bp, Homo sapiens
accaatctccrttctgtttct

SEQ ID NO: 22137 - DNA, 21 bp, Homo sapiens
gctcacaaatrtattatttgg

SEQ ID NO: 22138 - DNA, 21 bp, Homo sapiens
aacacacttayctctaggaca

SEQ ID NO: 22139 - DNA, 21 bp, Homo sapiens
ctgtatccagragcagagagg

SEQ ID NO: 22140 - DNA, 21 bp, Homo sapiens
gggcccggtgmggacttgagc

SEQ ID NO: 22141 - DNA, 21 bp, Homo sapiens
ctacgaggagytgcagcaggt

SEQ ID NO: 22142 - DNA, 21 bp, Homo sapiens
ccggctgctgrggcatggatc

SEQ ID NO: 22143 - DNA, 21 bp, Homo sapiens
gctttttggarggttactgta

SEQ ID NO: 22144 - DNA, 21 bp, Homo sapiens
aaagagatacrtagagtgagt

SEQ ID NO: 22145 - DNA, 21 bp, Homo sapiens
cagctccttcrgaaggtgtcc

SEQ ID NO: 22146 - DNA, 21 bp, Homo sapiens
ccattgcccaygtggctccag

SEQ ID NO: 22147 - DNA, 21 bp, Homo sapiens
gaacagtattrttgggtcata

SEQ ID NO: 22148 - DNA, 21 bp, Homo sapiens
ttttttatagkgtcttgttct

SEQ ID NO: 22149 - DNA, 21 bp, Homo sapiens
cataaaacaaygtggccaccc

SEQ ID NO: 22150 - DNA, 21 bp, Homo sapiens
tgcaaaacacycttctaaata

SEQ ID NO: 22151 - DNA, 21 bp, Homo sapiens
ggttagagggmgtgttcgatg

SEQ ID NO: 22152 - DNA, 21 bp, Homo sapiens
gtgcctgggakgcgcccagtg

SEQ ID NO: 22153 - DNA, 21 bp, Homo sapiens
tgatggggttyagtgacatga

SEQ ID NO: 22154 - DNA, 21 bp, Homo sapiens
gcaaggccagkaagggatgca

SEQ ID NO: 22155 - DNA, 21 bp, Homo sapiens
ttcttctttgycatatgtttt

SEQ ID NO: 22156 - DNA, 21 bp, Homo sapiens
actgagagaarcttctatgat

SEQ ID NO: 22157 - DNA, 21 bp, Homo sapiens
ggaacttaacyggaacatata

SEQ ID NO: 22158 - DNA, 21 bp, Homo sapiens
gacagggaaargagatgcttt

SEQ ID NO: 22159 - DNA, 21 bp, Homo sapiens
cgaatgttcgyattggctaaa

SEQ ID NO: 22160 - DNA, 21 bp, Homo sapiens
gcaaaaaatayagaaagtgta

SEQ ID NO: 22161 - DNA, 21 bp, Homo sapiens
ctctgtagtcytcctaatttt

SEQ ID NO: 22162 - DNA, 21 bp, Homo sapiens
caagaccaggrtaaacctccg

SEQ ID NO: 22163 - DNA, 21 bp, Homo sapiens
aggctcacaaygggagacatt

SEQ ID NO: 22164 - DNA, 21 bp, Homo sapiens
ccgccttcgtkgtggatggca

SEQ ID NO: 22165 - DNA, 21 bp, Homo sapiens
actctactgcycaggctgagg

SEQ ID NO: 22166 - DNA, 21 bp, Homo sapiens
ttgaatgaaargtctgaatct

SEQ ID NO: 22167 - DNA, 21 bp, Homo sapiens
tcatgactgckcaggcacagt

SEQ ID NO: 22168 - DNA, 21 bp, Homo sapiens
tcctgctttcytagttttttt

SEQ ID NO: 22169 - DNA, 21 bp, Homo sapiens
ctatcacaaamaagtacagag

SEQ ID NO: 22170 - DNA, 21 bp, Homo sapiens
tcaatgctgakttgactgtaa

SEQ ID NO: 22171 - DNA, 21 bp, Homo sapiens
acaatccataytgattggaaa

SEQ ID NO: 22172 - DNA, 21 bp, Homo sapiens
attacaaggtrtgaattttga

SEQ ID NO: 22173 - DNA, 21 bp, Homo sapiens
agcgaagggtytggcctcgct

SEQ ID NO: 22174 - DNA, 21 bp, Homo sapiens
caagcagaagygccccgcagt

SEQ ID NO: 22175 - DNA, 21 bp, Homo sapiens
caggcttcagytctgggtggg

SEQ ID NO: 22176 - DNA, 21 bp, Homo sapiens
gagcatttgarctaaaggaga

SEQ ID NO: 22177 - DNA, 21 bp, Homo sapiens
aagcgtcagcraaagaccagc

SEQ ID NO: 22178 - DNA, 21 bp, Homo sapiens
tttttgcacaygtatataaca

SEQ ID NO: 22179 - DNA, 21 bp, Homo sapiens
acttgctttayatgtcaccca

SEQ ID NO: 22180 - DNA, 21 bp, Homo sapiens
gcctgggagcygggtatattc

SEQ ID NO: 22181 - DNA, 21 bp, Homo sapiens
ttggccagcaygatcccccct

SEQ ID NO: 22182 - DNA, 21 bp, Homo sapiens
ctgagctcacygtgctggctg

SEQ ID NO: 22183 - DNA, 21 bp, Homo sapiens
aaacgtcactytcacactaat

SEQ ID NO: 22184 - DNA, 21 bp, Homo sapiens
tctacattgcrattgaacata

SEQ ID NO: 22185 - DNA, 21 bp, Homo sapiens
tatatattccygaagtaccta

SEQ ID NO: 22186 - DNA, 21 bp, Homo sapiens
accctgctaaygccccctcca

SEQ ID NO: 22187 - DNA, 21 bp, Homo sapiens
cttcttccccrtgaatccggt

SEQ ID NO: 22188 - DNA, 21 bp, Homo sapiens
tcctcgcagcmcacactgctg

SEQ ID NO: 22189 - DNA, 21 bp, Homo sapiens
cctttcccagmgattctcctt

SEQ ID NO: 22190 - DNA, 21 bp, Homo sapiens
tacattcttcrgtgtcactta

SEQ ID NO: 22191 - DNA, 21 bp, Homo sapiens
tccacattccrtttttttgtt

SEQ ID NO: 22192 - DNA, 21 bp, Homo sapiens
tggatttgatracatcacagc

SEQ ID NO: 22193 - DNA, 21 bp, Homo sapiens
gggtgacgctycttgccaccc

SEQ ID NO: 22194 - DNA, 21 bp, Homo sapiens
tgaactagcaraggcagccaa

SEQ ID NO: 22195 - DNA, 21 bp, Homo sapiens
acagggacccraagacagtgg

SEQ ID NO: 22196 - DNA, 21 bp, Homo sapiens
atatccctccytatcttcacc

SEQ ID NO: 22197 - DNA, 21 bp, Homo sapiens
gaagtctgagrcccaccccgc

SEQ ID NO: 22198 - DNA, 21 bp, Homo sapiens
gtcgttaaggraagaatggct

SEQ ID NO: 22199 - DNA, 21 bp, Homo sapiens
gccaaccgggraaaagcgagg

SEQ ID NO: 22200 - DNA, 21 bp, Homo sapiens
atgttgggggmttggaagcac

SEQ ID NO: 22201 - DNA, 21 bp, Homo sapiens
cagaccctgcycctacctacc

SEQ ID NO: 22202 - DNA, 21 bp, Homo sapiens
gtcacctcctyggtttggcta

SEQ ID NO: 22203 - DNA, 21 bp, Homo sapiens
gccacacactrtggcaagggg

SEQ ID NO: 22204 - DNA, 21 bp, Homo sapiens
ggaggagcctytggtggaggg

SEQ ID NO: 22205 - DNA, 21 bp, Homo sapiens
ccagtgccccygcactcatgg

SEQ ID NO: 22206 - DNA, 21 bp, Homo sapiens
acagagcaagygaggggcaga

SEQ ID NO: 22207 - DNA, 21 bp, Homo sapiens
tcaagaaaacyctggggaggg

SEQ ID NO: 22208 - DNA, 21 bp, Homo sapiens
cgccgctgcgragggaggtga

SEQ ID NO: 22209 - DNA, 21 bp, Homo sapiens
tgagcaggaayaccactgcca

SEQ ID NO: 22210 - DNA, 21 bp, Homo sapiens
atggaggccayacagcagaaa

SEQ ID NO: 22211 - DNA, 21 bp, Homo sapiens
gctcaataaakgttctcaaaa

SEQ ID NO: 22212 - DNA, 21 bp, Homo sapiens
gtgggagtgaragtccagaga

SEQ ID NO: 22213 - DNA, 21 bp, Homo sapiens
cagctgggacytggggaggat

SEQ ID NO: 22214 - DNA, 21 bp, Homo sapiens
agatcttcaamaactgtcctg

SEQ ID NO: 22215 - DNA, 21 bp, Homo sapiens
ccaaaataaayaccctcctca

SEQ ID NO: 22216 - DNA, 21 bp, Homo sapiens
tgggctagtgyacagcctggc

SEQ ID NO: 22217 - DNA, 21 bp, Homo sapiens
aggaagccctrcaaattgaca

SEQ ID NO: 22218 - DNA, 21 bp, Homo sapiens
cagaagggcarctgtgacatt

SEQ ID NO: 22219 - DNA, 21 bp, Homo sapiens
acgccctggcygagcagaggt

SEQ ID NO: 22220 - DNA, 21 bp, Homo sapiens
tcttgaatttyttcccctatt

SEQ ID NO: 22221 - DNA, 21 bp, Homo sapiens
atgtgacctcyggcaagttgc

SEQ ID NO: 22222 - DNA, 21 bp, Homo sapiens
gagagttccamacacatcata

SEQ ID NO: 22223 - DNA, 21 bp, Homo sapiens
tggtatttccrgtcaaatctg

SEQ ID NO: 22224 - DNA, 21 bp, Homo sapiens
cccaatacatyttaactaacc

SEQ ID NO: 22225 - DNA, 21 bp, Homo sapiens
atgagtgagtmgataaatgag

SEQ ID NO: 22226 - DNA, 21 bp, Homo sapiens
atgggactccrctaccttctc

SEQ ID NO: 22227 - DNA, 21 bp, Homo sapiens
taaaatgaggyagtcatcttt

SEQ ID NO: 22228 - DNA, 21 bp, Homo sapiens
gcacattcacrccattaacac

SEQ ID NO: 22229 - DNA, 21 bp, Homo sapiens
aggataccttkaggaaatctt

SEQ ID NO: 22230 - DNA, 21 bp, Homo sapiens
tctcattaccraaggcacaaa

SEQ ID NO: 22231 - DNA, 21 bp, Homo sapiens
ttcaaaaacayttacagcatc

SEQ ID NO: 22232 - DNA, 21 bp, Homo sapiens
ctcagctgctyttgcctggaa

SEQ ID NO: 22233 - DNA, 21 bp, Homo sapiens
cgtataaaatrttggcaaact

SEQ ID NO: 22234 - DNA, 21 bp, Homo sapiens
ataacaatacyagtcaacatt

SEQ ID NO: 22235 - DNA, 21 bp, Homo sapiens
ggttgaataaygtcaagaggg

SEQ ID NO: 22236 - DNA, 21 bp, Homo sapiens
gatggtacgaygaacacgttc

SEQ ID NO: 22237 - DNA, 21 bp, Homo sapiens
tcacatcactygaatctgctg

SEQ ID NO: 22238 - DNA, 21 bp, Homo sapiens
atatacatacyatgctaatga

SEQ ID NO: 22239 - DNA, 21 bp, Homo sapiens
ttttcataaayggaaaagata

SEQ ID NO: 22240 - DNA, 21 bp, Homo sapiens
ggaggcttttrgaagggtcca

SEQ ID NO: 22241 - DNA, 21 bp, Homo sapiens
caacactgtargaaacatttt

SEQ ID NO: 22242 - DNA, 21 bp, Homo sapiens
gactttccccrgaccagggcc

SEQ ID NO: 22243 - DNA, 21 bp, Homo sapiens
tgtttatggaktgaacaggga

SEQ ID NO: 22244 - DNA, 21 bp, Homo sapiens
gctagttaccmcaataccatt

SEQ ID NO: 22245 - DNA, 21 bp, Homo sapiens
tcacttctcamaatgttttca

SEQ ID NO: 22246 - DNA, 21 bp, Homo sapiens
atgtgagggcmtctaaaacct

SEQ ID NO: 22247 - DNA, 21 bp, Homo sapiens
cctccttttayaggctttgtg

SEQ ID NO: 22248 - DNA, 21 bp, Homo sapiens
agatgggggcyggaacgtttt

SEQ ID NO: 22249 - DNA, 21 bp, Homo sapiens
taagaacttgrggactcttat

SEQ ID NO: 22250 - DNA, 21 bp, Homo sapiens
agttttgtcaragaaatacaa

SEQ ID NO: 22251 - DNA, 21 bp, Homo sapiens
gtagactcacygtgtgaaatg

SEQ ID NO: 22252 - DNA, 21 bp, Homo sapiens
gagcaatttartcgctccttg

SEQ ID NO: 22253 - DNA, 21 bp, Homo sapiens
tgtgcccctgycccctgaatc

SEQ ID NO: 22254 - DNA, 21 bp, Homo sapiens
aagttaggacygccaaagtgg

SEQ ID NO: 22255 - DNA, 21 bp, Homo sapiens
tgcctcgaggyagcagcctga

SEQ ID NO: 22256 - DNA, 21 bp, Homo sapiens
gaaaggtgccytgagaagcct

SEQ ID NO: 22257 - DNA, 21 bp, Homo sapiens
gttttatctgrgtttgatatt

SEQ ID NO: 22258 - DNA, 21 bp, Homo sapiens
gtttgagtgtktttataagct

SEQ ID NO: 22259 - DNA, 21 bp, Homo sapiens
ctgcaatcaayttcttcaaaa

SEQ ID NO: 22260 - DNA, 21 bp, Homo sapiens
gatgtaacaarctgcttgcca

SEQ ID NO: 22261 - DNA, 21 bp, Homo sapiens
tacagcgttgrgtttttcctg

SEQ ID NO: 22262 - DNA, 21 bp, Homo sapiens
atcttccagtrgacatggagc

SEQ ID NO: 22263 - DNA, 21 bp, Homo sapiens
ggaatatctamatggggtgct

SEQ ID NO: 22264 - DNA, 21 bp, Homo sapiens
ggcttggagaygccttttagt

SEQ ID NO: 22265 - DNA, 21 bp, Homo sapiens
gagctgctacygaggagttaa

SEQ ID NO: 22266 - DNA, 21 bp, Homo sapiens
ggttgcacctycactggattt

SEQ ID NO: 22267 - DNA, 21 bp, Homo sapiens
atccctgagartctgttcttt

SEQ ID NO: 22268 - DNA, 21 bp, Homo sapiens
ccactcctgcrataactaatt

SEQ ID NO: 22269 - DNA, 21 bp, Homo sapiens
atgaaaagttrtagcctcaga

SEQ ID NO: 22270 - DNA, 21 bp, Homo sapiens
tttgccccccrtcctggaccc

SEQ ID NO: 22271 - DNA, 21 bp, Homo sapiens
cacaggtgaarccagaaccca

SEQ ID NO: 22272 - DNA, 21 bp, Homo sapiens
cggcttagagragaaccggga

SEQ ID NO: 22273 - DNA, 21 bp, Homo sapiens
gaaataggacrcagaatactc

SEQ ID NO: 22274 - DNA, 21 bp, Homo sapiens
atgcatcacarcatgcatccc

SEQ ID NO: 22275 - DNA, 21 bp, Homo sapiens
ggttgatgggrgaagctagag

SEQ ID NO: 22276 - DNA, 21 bp, Homo sapiens
ttcctcccatyccttgtgaca

SEQ ID NO: 22277 - DNA, 21 bp, Homo sapiens
actcctgaaakggcgtagtcc

SEQ ID NO: 22278 - DNA, 21 bp, Homo sapiens
ccaaagtattygcattatcaa

SEQ ID NO: 22279 - DNA, 21 bp, Homo sapiens
ataatgacacygttgttctaa

SEQ ID NO: 22280 - DNA, 21 bp, Homo sapiens
agacacttackatttctctcc

SEQ ID NO: 22281 - DNA, 21 bp, Homo sapiens
taagatcttcrtctctggggg

SEQ ID NO: 22282 - DNA, 21 bp, Homo sapiens
ccaatcatctrgttgtaagca

SEQ ID NO: 22283 - DNA, 21 bp, Homo sapiens
ccacagaaacyagaccctctc

SEQ ID NO: 22284 - DNA, 21 bp, Homo sapiens
acctgtgtaakaattagaata

SEQ ID NO: 22285 - DNA, 21 bp, Homo sapiens
tatcaactggrgacatagcta

SEQ ID NO: 22286 - DNA, 21 bp, Homo sapiens
gacagagaacrtcaagaggga

SEQ ID NO: 22287 - DNA, 21 bp, Homo sapiens
aagttctcagytttgttttat

SEQ ID NO: 22288 - DNA, 21 bp, Homo sapiens
tgggtcctgaytaccagcccc

SEQ ID NO: 22289 - DNA, 21 bp, Homo sapiens
aagtggtagamaccaagatat

SEQ ID NO: 22290 - DNA, 21 bp, Homo sapiens
aataaacaggktgatgtgaca

SEQ ID NO: 22291 - DNA, 21 bp, Homo sapiens
tctaccctctrtgggctgaca

SEQ ID NO: 22292 - DNA, 21 bp, Homo sapiens
gacgctcacgrgcctcggaac

SEQ ID NO: 22293 - DNA, 21 bp, Homo sapiens
cacagcaaaaracagaggggg

SEQ ID NO: 22294 - DNA, 21 bp, Homo sapiens
ccagttgggayagacacctga

SEQ ID NO: 22295 - DNA, 21 bp, Homo sapiens
atatagacagygtgaaaaaag

SEQ ID NO: 22296 - DNA, 21 bp, Homo sapiens
aggcataagcygtcacacctg

SEQ ID NO: 22297 - DNA, 21 bp, Homo sapiens
cgtatcaggcrctttgcttgc

SEQ ID NO: 22298 - DNA, 21 bp, Homo sapiens
ggagaagctgygcttggggag

SEQ ID NO: 22299 - DNA, 21 bp, Homo sapiens
gtgagtgtgaygacaaatggc

SEQ ID NO: 22300 - DNA, 21 bp, Homo sapiens
gcaaataaaayggtttatgag

SEQ ID NO: 22301 - DNA, 21 bp, Homo sapiens
aaatggcatcrgacaagactt

SEQ ID NO: 22302 - DNA, 21 bp, Homo sapiens
gaatgctgccyggtaaataaa

SEQ ID NO: 22303 - DNA, 21 bp, Homo sapiens
gaggacatgtrggaatgcaat

SEQ ID NO: 22304 - DNA, 21 bp, Homo sapiens
caaagtcctayacatatacga

SEQ ID NO: 22305 - DNA, 21 bp, Homo sapiens
tttccacttaycaggttatga

SEQ ID NO: 22306 - DNA, 21 bp, Homo sapiens
tcttcgtatcrcctattatta

SEQ ID NO: 22307 - DNA, 21 bp, Homo sapiens
aaggttactcyggcaaagtgc

SEQ ID NO: 22308 - DNA, 21 bp, Homo sapiens
caatttattaytggagaggga

SEQ ID NO: 22309 - DNA, 21 bp, Homo sapiens
ctttatagatmtgccaagtta

SEQ ID NO: 22310 - DNA, 21 bp, Homo sapiens
tatggcaaacytcagctactt

SEQ ID NO: 22311 - DNA, 21 bp, Homo sapiens
attgcacaatrccaagaacat

SEQ ID NO: 22312 - DNA, 21 bp, Homo sapiens
aggaccccgayaaaggttaat

SEQ ID NO: 22313 - DNA, 21 bp, Homo sapiens
ttatttgcagrtggacaaaac

SEQ ID NO: 22314 - DNA, 21 bp, Homo sapiens
aatattttctytctcagtctg

SEQ ID NO: 22315 - DNA, 21 bp, Homo sapiens
gttaaacctgyatatcagtct

SEQ ID NO: 22316 - DNA, 21 bp, Homo sapiens
ctctctctccytttcagatat

SEQ ID NO: 22317 - DNA, 21 bp, Homo sapiens
gtgcccactcytttctcatct

SEQ ID NO: 22318 - DNA, 21 bp, Homo sapiens
attgcataaamcaatacctat

SEQ ID NO: 22319 - DNA, 21 bp, Homo sapiens
ttaacccaatktcgtatctgc

SEQ ID NO: 22320 - DNA, 21 bp, Homo sapiens
caacaagtccycaagacatgt

SEQ ID NO: 22321 - DNA, 21 bp, Homo sapiens
atagggcattycatcagaagt

SEQ ID NO: 22322 - DNA, 21 bp, Homo sapiens
gtccatagccytaccacggtc

SEQ ID NO: 22323 - DNA, 21 bp, Homo sapiens
acttgttagaygatgaaaact

SEQ ID NO: 22324 - DNA, 21 bp, Homo sapiens
tgttatatagmgcaatcatga

SEQ ID NO: 22325 - DNA, 21 bp, Homo sapiens
cccagggaatraagactattg

SEQ ID NO: 22326 - DNA, 21 bp, Homo sapiens
acttacttatrttaagtaggg

SEQ ID NO: 22327 - DNA, 21 bp, Homo sapiens
cactaatttgrtgatcttaat

SEQ ID NO: 22328 - DNA, 21 bp, Homo sapiens
tggtggaatayggttacaaag

SEQ ID NO: 22329 - DNA, 21 bp, Homo sapiens
tctatgtgagmgtgctacatt

SEQ ID NO: 22330 - DNA, 21 bp, Homo sapiens
actttctgctyagcaaccttg

SEQ ID NO: 22331 - DNA, 21 bp, Homo sapiens
ctctccttcckatgggaattt

SEQ ID NO: 22332 - DNA, 21 bp, Homo sapiens
gtctgagcatygcttatccag

SEQ ID NO: 22333 - DNA, 21 bp, Homo sapiens
ccaccagaccmtgcaagcaaa

SEQ ID NO: 22334 - DNA, 21 bp, Homo sapiens
tattcaactgyatttgagcaa

SEQ ID NO: 22335 - DNA, 21 bp, Homo sapiens
aaaatatacarttgttttaag

SEQ ID NO: 22336 - DNA, 21 bp, Homo sapiens
cttccttccartctcctactc

SEQ ID NO: 22337 - DNA, 21 bp, Homo sapiens
gaaggcattgytctcctgagc

SEQ ID NO: 22338 - DNA, 21 bp, Homo sapiens
ttggcaaataktgcctggcag

SEQ ID NO: 22339 - DNA, 21 bp, Homo sapiens
tgtggaagacrtttatagaac

SEQ ID NO: 22340 - DNA, 21 bp, Homo sapiens
cacaatggacragaccatgct

SEQ ID NO: 22341 - DNA, 21 bp, Homo sapiens
gctgacttttmaacctcattc

SEQ ID NO: 22342 - DNA, 21 bp, Homo sapiens
cccttgcccarcagacctctc

SEQ ID NO: 22343 - DNA, 21 bp, Homo sapiens
aaatttcacartcaactaaat

SEQ ID NO: 22344 - DNA, 21 bp, Homo sapiens
aggaactaccrctgtgatgtc

SEQ ID NO: 22345 - DNA, 21 bp, Homo sapiens
tttgcaggcamaacaatgtca

SEQ ID NO: 22346 - DNA, 21 bp, Homo sapiens
attagtaggcygggcacagct

SEQ ID NO: 22347 - DNA, 21 bp, Homo sapiens
ttctgggaaartctttttgtt

SEQ ID NO: 22348 - DNA, 21 bp, Homo sapiens
gtaatgctagkcaagacttta

SEQ ID NO: 22349 - DNA, 21 bp, Homo sapiens
tgcttgcaagrgagactttgc

SEQ ID NO: 22350 - DNA, 21 bp, Homo sapiens
ctagagacatrgtagaaagaa

SEQ ID NO: 22351 - DNA, 21 bp, Homo sapiens
ttctggaggtyggaagtataa

SEQ ID NO: 22352 - DNA, 21 bp, Homo sapiens
tataactttayaaagatattt

SEQ ID NO: 22353 - DNA, 21 bp, Homo sapiens
tataatgttaygtttatacac

SEQ ID NO: 22354 - DNA, 21 bp, Homo sapiens
ggggactggcracttggaaag

SEQ ID NO: 22355 - DNA, 21 bp, Homo sapiens
taaaataaggrtcatacagct

SEQ ID NO: 22356 - DNA, 21 bp, Homo sapiens
ccttggtgacyggtgtctgag

SEQ ID NO: 22357 - DNA, 21 bp, Homo sapiens
gcagggtagtytatctgggaa

SEQ ID NO: 22358 - DNA, 21 bp, Homo sapiens
gtttttcaagmagcattcctc

SEQ ID NO: 22359 - DNA, 21 bp, Homo sapiens
cctgcctgccrgggtttattt

SEQ ID NO: 22360 - DNA, 21 bp, Homo sapiens
acatgctgtayaggccttgag

SEQ ID NO: 22361 - DNA, 21 bp, Homo sapiens
caagtgtaagktttcaaggca

SEQ ID NO: 22362 - DNA, 21 bp, Homo sapiens
tttcagagtaygttcttagta

SEQ ID NO: 22363 - DNA, 21 bp, Homo sapiens
acaaggaatcygcacaaggat

SEQ ID NO: 22364 - DNA, 21 bp, Homo sapiens
ctatttaacamaactctgctt

SEQ ID NO: 22365 - DNA, 21 bp, Homo sapiens
ttaagatagtyagcatcagtt

SEQ ID NO: 22366 - DNA, 21 bp, Homo sapiens
gtctcaggaaygttgggtcat

SEQ ID NO: 22367 - DNA, 21 bp, Homo sapiens
atagcacattkcacattataa

SEQ ID NO: 22368 - DNA, 21 bp, Homo sapiens
aggcaagctcrtttgcactct

SEQ ID NO: 22369 - DNA, 21 bp, Homo sapiens
cccaccccaaytcaactccat

SEQ ID NO: 22370 - DNA, 21 bp, Homo sapiens
gtactctaccyaccatctaat

SEQ ID NO: 22371 - DNA, 21 bp, Homo sapiens
tctctccactytggacacacg

SEQ ID NO: 22372 - DNA, 21 bp, Homo sapiens
attgaatgaaygaatgttttg

SEQ ID NO: 22373 - DNA, 21 bp, Homo sapiens
caaaggcatcygccataaagc

SEQ ID NO: 22374 - DNA, 21 bp, Homo sapiens
gtgaaaatgayagtatgacac

SEQ ID NO: 22375 - DNA, 21 bp, Homo sapiens
atctactggcygccatggctg

SEQ ID NO: 22376 - DNA, 21 bp, Homo sapiens
tttcaaaaaayaaatcaaatg

SEQ ID NO: 22377 - DNA, 21 bp, Homo sapiens
ctttgaaaccytccttgaaaa

SEQ ID NO: 22378 - DNA, 21 bp, Homo sapiens
gccccacttayccttcttctc

SEQ ID NO: 22379 - DNA, 21 bp, Homo sapiens
cttgactgatytttgacttct

SEQ ID NO: 22380 - DNA, 21 bp, Homo sapiens
aatattaaggmtacagttgta

SEQ ID NO: 22381 - DNA, 21 bp, Homo sapiens
tttgaccacgygtatttgaac

SEQ ID NO: 22382 - DNA, 21 bp, Homo sapiens
gttttagtacragtaccctat

SEQ ID NO: 22383 - DNA, 21 bp, Homo sapiens
tagctattaartatcagaatc

SEQ ID NO: 22384 - DNA, 21 bp, Homo sapiens
gacattttcayttgagtgcct

SEQ ID NO: 22385 - DNA, 21 bp, Homo sapiens
ttgggctgccygtgtactttg

SEQ ID NO: 22386 - DNA, 21 bp, Homo sapiens
ccagagtaagrctgaagtcca

SEQ ID NO: 22387 - DNA, 21 bp, Homo sapiens
gtgatacgacmgtgcagacgc

SEQ ID NO: 22388 - DNA, 21 bp, Homo sapiens
tctacagagayggatccaaga

SEQ ID NO: 22389 - DNA, 21 bp, Homo sapiens
acactcaccaycagcctggac

SEQ ID NO: 22390 - DNA, 21 bp, Homo sapiens
ctgttaagggytgtgggggaa

SEQ ID NO: 22391 - DNA, 21 bp, Homo sapiens
atcatcctgaratctacctta

SEQ ID NO: 22392 - DNA, 21 bp, Homo sapiens
tgtctcctggygtaaaagatc

SEQ ID NO: 22393 - DNA, 21 bp, Homo sapiens
aacatagcagracttaccttt

SEQ ID NO: 22394 - DNA, 21 bp, Homo sapiens
tttgaagaaaycttaagaccc

SEQ ID NO: 22395 - DNA, 21 bp, Homo sapiens
attttctgatrccggctacct

SEQ ID NO: 22396 - DNA, 21 bp, Homo sapiens
gtgattgccakgtaagatatg

SEQ ID NO: 22397 - DNA, 21 bp, Homo sapiens
aaatgtttacrtttgcacaaa

SEQ ID NO: 22398 - DNA, 21 bp, Homo sapiens
cttgtactgayggggatatca

SEQ ID NO: 22399 - DNA, 21 bp, Homo sapiens
gtgcacacacrcactgtcatg

SEQ ID NO: 22400 - DNA, 21 bp, Homo sapiens
agagaaaatgrtctcaatcca

SEQ ID NO: 22401 - DNA, 21 bp, Homo sapiens
taggagaccaygtatctgtgc

SEQ ID NO: 22402 - DNA, 21 bp, Homo sapiens
ccaacaggcamattccaatga

SEQ ID NO: 22403 - DNA, 21 bp, Homo sapiens
caattcaaagrctactggttg

SEQ ID NO: 22404 - DNA, 21 bp, Homo sapiens
actaactgctmcctggagtcc

SEQ ID NO: 22405 - DNA, 21 bp, Homo sapiens
tggtgcagtgrggagcaccag

SEQ ID NO: 22406 - DNA, 21 bp, Homo sapiens
cacaaacaaayacgtacccat

SEQ ID NO: 22407 - DNA, 21 bp, Homo sapiens
gagaacagtargttaaataaa

SEQ ID NO: 22408 - DNA, 21 bp, Homo sapiens
ggtataataamctgtcttaat

SEQ ID NO: 22409 - DNA, 21 bp, Homo sapiens
cagataaaaakaaagaagtgt

SEQ ID NO: 22410 - DNA, 21 bp, Homo sapiens
gatgttttgtyaacatatcct

SEQ ID NO: 22411 - DNA, 21 bp, Homo sapiens
aggtagagtcyggacatgtgc

SEQ ID NO: 22412 - DNA, 21 bp, Homo sapiens
taaaaacatcytttaaaaagt

SEQ ID NO: 22413 - DNA, 21 bp, Homo sapiens
gtggttcccckgaatcctata

SEQ ID NO: 22414 - DNA, 21 bp, Homo sapiens
gatccatcgtktccttgtggc

SEQ ID NO: 22415 - DNA, 21 bp, Homo sapiens
gataactggckttgttacttg

SEQ ID NO: 22416 - DNA, 21 bp, Homo sapiens
tttgtgttatytgttacagac

SEQ ID NO: 22417 - DNA, 21 bp, Homo sapiens
cagtggtggcrgcagctgcag

SEQ ID NO: 22418 - DNA, 21 bp, Homo sapiens
tctgtcatacracacatgagt

SEQ ID NO: 22419 - DNA, 21 bp, Homo sapiens
acagatttggragaatcaaaa

SEQ ID NO: 22420 - DNA, 21 bp, Homo sapiens
aacatggctcrgagctcagtt

SEQ ID NO: 22421 - DNA, 21 bp, Homo sapiens
aaatagaaacyaacaaaagat

SEQ ID NO: 22422 - DNA, 21 bp, Homo sapiens
tataatttctrttcacaacag

SEQ ID NO: 22423 - DNA, 21 bp, Homo sapiens
ggcagccacartgatgtaccc

SEQ ID NO: 22424 - DNA, 21 bp, Homo sapiens
tctggcctccrtcatagcctg

SEQ ID NO: 22425 - DNA, 21 bp, Homo sapiens
gatacaaagcycagattcgcc

SEQ ID NO: 22426 - DNA, 21 bp, Homo sapiens
gattttactcrcttcactact

SEQ ID NO: 22427 - DNA, 21 bp, Homo sapiens
ccatgagagaytgtcctgttc

SEQ ID NO: 22428 - DNA, 21 bp, Homo sapiens
aggctgtggaytccagaaaat

SEQ ID NO: 22429 - DNA, 21 bp, Homo sapiens
tcaagtcatgrtttttagggt

SEQ ID NO: 22430 - DNA, 21 bp, Homo sapiens
tgtattgaatytttatatcag

SEQ ID NO: 22431 - DNA, 21 bp, Homo sapiens
gaggatttctrttagtaaatg

SEQ ID NO: 22432 - DNA, 21 bp, Homo sapiens
aaattttggaragcaatttgg

SEQ ID NO: 22433 - DNA, 21 bp, Homo sapiens
tcaggttaatrtcacagaaat

SEQ ID NO: 22434 - DNA, 21 bp, Homo sapiens
gcaaatgagtractctacctg

SEQ ID NO: 22435 - DNA, 21 bp, Homo sapiens
ggaattccacrtcttgagaat

SEQ ID NO: 22436 - DNA, 21 bp, Homo sapiens
gaagccatggrtctgcctcct

SEQ ID NO: 22437 - DNA, 21 bp, Homo sapiens
gataaattccrggttgtggtc

SEQ ID NO: 22438 - DNA, 21 bp, Homo sapiens
attttgaagarttctatgtgg

SEQ ID NO: 22439 - DNA, 21 bp, Homo sapiens
gtctatttagycagaaaaaat

SEQ ID NO: 22440 - DNA, 21 bp, Homo sapiens
accatgctctractgggcttt

SEQ ID NO: 22441 - DNA, 21 bp, Homo sapiens
acccattaagmaattgctccc

SEQ ID NO: 22442 - DNA, 21 bp, Homo sapiens
aactgaatatrtaaagaaaat

SEQ ID NO: 22443 - DNA, 21 bp, Homo sapiens
cattctgaacraaaaatggaa

SEQ ID NO: 22444 - DNA, 21 bp, Homo sapiens
aagcctgaacmttcaccctgt

SEQ ID NO: 22445 - DNA, 21 bp, Homo sapiens
ttttttgtccrtttgttttaa

SEQ ID NO: 22446 - DNA, 21 bp, Homo sapiens
gggaggtgtcmtctgccatcc

SEQ ID NO: 22447 - DNA, 21 bp, Homo sapiens
ttttctgttcrccctgcctgt

SEQ ID NO: 22448 - DNA, 21 bp, Homo sapiens
gtcaggagccrgttgagatct

SEQ ID NO: 22449 - DNA, 21 bp, Homo sapiens
ttcttgctacytggtggttcc

SEQ ID NO: 22450 - DNA, 21 bp, Homo sapiens
agtgggggagyttctgttgct

SEQ ID NO: 22451 - DNA, 21 bp, Homo sapiens
tcttctgtgcmatgggtccat

SEQ ID NO: 22452 - DNA, 21 bp, Homo sapiens
tcagcaagacrtgcctaggac

SEQ ID NO: 22453 - DNA, 21 bp, Homo sapiens
agatatatggkgtttatgttc

SEQ ID NO: 22454 - DNA, 21 bp, Homo sapiens
cagtaaatggrtcctactgtt

SEQ ID NO: 22455 - DNA, 21 bp, Homo sapiens
ggtggtggggygagggggtgg

SEQ ID NO: 22456 - DNA, 21 bp, Homo sapiens
cttatagctcygcacacatgt

SEQ ID NO: 22457 - DNA, 21 bp, Homo sapiens
tcttctccagygcggcggaag

SEQ ID NO: 22458 - DNA, 21 bp, Homo sapiens
tctttgatggytcccttcact

SEQ ID NO: 22459 - DNA, 21 bp, Homo sapiens
ggcgttgggtrctatgagaaa

SEQ ID NO: 22460 - DNA, 21 bp, Homo sapiens
tcaaaaggacmcagatatgaa

SEQ ID NO: 22461 - DNA, 21 bp, Homo sapiens
aaacgtccggyggatgagcca

SEQ ID NO: 22462 - DNA, 21 bp, Homo sapiens
cacaaagcagrtgctcatttt

SEQ ID NO: 22463 - DNA, 21 bp, Homo sapiens
cattgtgcccyattggctctg

SEQ ID NO: 22464 - DNA, 21 bp, Homo sapiens
ttctgtgagarcacatgaata

SEQ ID NO: 22465 - DNA, 21 bp, Homo sapiens
tcaattgagamcttctctctc

SEQ ID NO: 22466 - DNA, 21 bp, Homo sapiens
aagaggggaarttaattggtc

SEQ ID NO: 22467 - DNA, 21 bp, Homo sapiens
cacctttattyccaggtattt

SEQ ID NO: 22468 - DNA, 21 bp, Homo sapiens
aaattggtatygtaagagtcc

SEQ ID NO: 22469 - DNA, 21 bp, Homo sapiens
tttgttttgcytctggctgac

SEQ ID NO: 22470 - DNA, 21 bp, Homo sapiens
cacaggccacrgtagctgtgt

SEQ ID NO: 22471 - DNA, 21 bp, Homo sapiens
atgtactaaaygctgacctat

SEQ ID NO: 22472 - DNA, 21 bp, Homo sapiens
tgggttgagcrgacccatctg

SEQ ID NO: 22473 - DNA, 21 bp, Homo sapiens
ttctgaacccrcgtttcccat

SEQ ID NO: 22474 - DNA, 21 bp, Homo sapiens
agctagttgamaaggctgaag

SEQ ID NO: 22475 - DNA, 21 bp, Homo sapiens
tgggtcctccractttggcct

SEQ ID NO: 22476 - DNA, 21 bp, Homo sapiens
caactctcttycaaggtctgc

SEQ ID NO: 22477 - DNA, 21 bp, Homo sapiens
tgggtcagctyagcctggaag

SEQ ID NO: 22478 - DNA, 21 bp, Homo sapiens
aaagggaggarggatggacca

SEQ ID NO: 22479 - DNA, 21 bp, Homo sapiens
aagccttcccygatttcccaa

SEQ ID NO: 22480 - DNA, 21 bp, Homo sapiens
acaaaggtcaycttcctccca

SEQ ID NO: 22481 - DNA, 21 bp, Homo sapiens
agctttctggmtttgtgcaag

SEQ ID NO: 22482 - DNA, 21 bp, Homo sapiens
tataaatggaraaataactgt

SEQ ID NO: 22483 - DNA, 21 bp, Homo sapiens
tctgtaatgcrtgaaaggggc

SEQ ID NO: 22484 - DNA, 21 bp, Homo sapiens
aaaataattakcggataatca

SEQ ID NO: 22485 - DNA, 21 bp, Homo sapiens
gtttcccacartgtgtccccg

SEQ ID NO: 22486 - DNA, 21 bp, Homo sapiens
aaaacactgamatctatttac

SEQ ID NO: 22487 - DNA, 21 bp, Homo sapiens
ataagtgtctrctccagctgg

SEQ ID NO: 22488 - DNA, 21 bp, Homo sapiens
aactgggggtraaaggtggaa

SEQ ID NO: 22489 - DNA, 21 bp, Homo sapiens
tcagtatgaartgaactgtcc

SEQ ID NO: 22490 - DNA, 21 bp, Homo sapiens
acagaccccartacacagttt

SEQ ID NO: 22491 - DNA, 21 bp, Homo sapiens
gtgcccaggcyctcctaacac

SEQ ID NO: 22492 - DNA, 21 bp, Homo sapiens
atccatggggkcccaggcagg

SEQ ID NO: 22493 - DNA, 21 bp, Homo sapiens
ttctcctcttygattcttctt

SEQ ID NO: 22494 - DNA, 21 bp, Homo sapiens
gggggagttckccagggagaa

SEQ ID NO: 22495 - DNA, 21 bp, Homo sapiens
aggctcttccyaggcacattt

SEQ ID NO: 22496 - DNA, 21 bp, Homo sapiens
ccagcctatcyggtgggtggg

SEQ ID NO: 22497 - DNA, 21 bp, Homo sapiens
actttgatgtrggctgggctg

SEQ ID NO: 22498 - DNA, 21 bp, Homo sapiens
atatttggtcmagaacaaagc

SEQ ID NO: 22499 - DNA, 21 bp, Homo sapiens
gtaacctcgcygaagacatgg

SEQ ID NO: 22500 - DNA, 21 bp, Homo sapiens
ccctggcttayggacacagtc

SEQ ID NO: 22501 - DNA, 21 bp, Homo sapiens
gacctagtccyctttcctcta

SEQ ID NO: 22502 - DNA, 21 bp, Homo sapiens
atctttatgtyctggatcggg

SEQ ID NO: 22503 - DNA, 21 bp, Homo sapiens
tgggtagacargatgaccatt

SEQ ID NO: 22504 - DNA, 21 bp, Homo sapiens
cactttgtgtrgcactctcca

SEQ ID NO: 22505 - DNA, 21 bp, Homo sapiens
cagatgctgcytctgaggttc

SEQ ID NO: 22506 - DNA, 21 bp, Homo sapiens
actgaaaggaragacaggtca

SEQ ID NO: 22507 - DNA, 21 bp, Homo sapiens
acatccctggrcagcatgagg

SEQ ID NO: 22508 - DNA, 21 bp, Homo sapiens
aggatagcccygggcagaact

SEQ ID NO: 22509 - DNA, 21 bp, Homo sapiens
aggttgtatayatagggcaga

SEQ ID NO: 22510 - DNA, 21 bp, Homo sapiens
acagcccccartgagggagcc

SEQ ID NO: 22511 - DNA, 21 bp, Homo sapiens
aaagtggggcrtgaagatctt

SEQ ID NO: 22512 - DNA, 21 bp, Homo sapiens
ccagtgggatyagtgctcaaa

SEQ ID NO: 22513 - DNA, 21 bp, Homo sapiens
gccttccagcmtaaaatctca

SEQ ID NO: 22514 - DNA, 21 bp, Homo sapiens
ttaagctcctkgatataccca

SEQ ID NO: 22515 - DNA, 21 bp, Homo sapiens
cctacgaagarcagcagcagc

SEQ ID NO: 22516 - DNA, 21 bp, Homo sapiens
ctatacccaayctcatggagg

SEQ ID NO: 22517 - DNA, 21 bp, Homo sapiens
acacttatctygtcacttctg

SEQ ID NO: 22518 - DNA, 21 bp, Homo sapiens
agtcacagtcmtaggtccaat

SEQ ID NO: 22519 - DNA, 21 bp, Homo sapiens
ttggatccggyggtttgagct

SEQ ID NO: 22520 - DNA, 21 bp, Homo sapiens
tggaatcatayggtatgcagc

SEQ ID NO: 22521 - DNA, 21 bp, Homo sapiens
gaatctctcaytgaatgttgt

SEQ ID NO: 22522 - DNA, 21 bp, Homo sapiens
ctgggcagggrtggacaacca

SEQ ID NO: 22523 - DNA, 21 bp, Homo sapiens
tggcagtgaargagcttcata

SEQ ID NO: 22524 - DNA, 21 bp, Homo sapiens
gcaaacaattmatgcttattt

SEQ ID NO: 22525 - DNA, 21 bp, Homo sapiens
ccgtgtgctayggctccttct

SEQ ID NO: 22526 - DNA, 21 bp, Homo sapiens
ggtggtcttgyctctgccaca

SEQ ID NO: 22527 - DNA, 21 bp, Homo sapiens
ttccttaaaakggtttttctg

SEQ ID NO: 22528 - DNA, 21 bp, Homo sapiens
aggctgggtckcactaagaag

SEQ ID NO: 22529 - DNA, 21 bp, Homo sapiens
atttgttaccktgaagacgtt

SEQ ID NO: 22530 - DNA, 21 bp, Homo sapiens
cctcattgccytgcatgggac

SEQ ID NO: 22531 - DNA, 21 bp, Homo sapiens
tctgctgactmctttttatat

SEQ ID NO: 22532 - DNA, 21 bp, Homo sapiens
agccatgtgcycagcttagaa

SEQ ID NO: 22533 - DNA, 21 bp, Homo sapiens
tcatctcatcyttgccttccc

SEQ ID NO: 22534 - DNA, 21 bp, Homo sapiens
aagaagacagygtaagataat

SEQ ID NO: 22535 - DNA, 21 bp, Homo sapiens
ctaagtgaccrtgggcatgca

SEQ ID NO: 22536 - DNA, 21 bp, Homo sapiens
gattaagtttyatgtttctga

SEQ ID NO: 22537 - DNA, 21 bp, Homo sapiens
accaaggcttyctctgtgcct

SEQ ID NO: 22538 - DNA, 21 bp, Homo sapiens
gcagaggcggyttctctccct

SEQ ID NO: 22539 - DNA, 21 bp, Homo sapiens
tgactcctccyagcacatcga

SEQ ID NO: 22540 - DNA, 21 bp, Homo sapiens
agacaccccaygctttgtttt

SEQ ID NO: 22541 - DNA, 21 bp, Homo sapiens
ctatcacccaytagcaaatca

SEQ ID NO: 22542 - DNA, 21 bp, Homo sapiens
acacacgggtrggcaactagt

SEQ ID NO: 22543 - DNA, 21 bp, Homo sapiens
aacctgggtcyctggtgacac

SEQ ID NO: 22544 - DNA, 21 bp, Homo sapiens
ctcctgtgcckctgattcaag

SEQ ID NO: 22545 - DNA, 21 bp, Homo sapiens
aatgatgacaygaaaacagct

SEQ ID NO: 22546 - DNA, 21 bp, Homo sapiens
gtggtttacartgagtgagag

SEQ ID NO: 22547 - DNA, 21 bp, Homo sapiens
gtccctgactraggaaatagt

SEQ ID NO: 22548 - DNA, 21 bp, Homo sapiens
gccactcctcyggcttaagga

SEQ ID NO: 22549 - DNA, 21 bp, Homo sapiens
tcagctctccrtgggttgccc

SEQ ID NO: 22550 - DNA, 21 bp, Homo sapiens
tacctcagttygttcaaccat

SEQ ID NO: 22551 - DNA, 21 bp, Homo sapiens
gtatcttggcrtcttgtatct

SEQ ID NO: 22552 - DNA, 21 bp, Homo sapiens
gttgtctctckgcttaagaac

SEQ ID NO: 22553 - DNA, 21 bp, Homo sapiens
atttgaacctkgtcttgagac

SEQ ID NO: 22554 - DNA, 21 bp, Homo sapiens
ctgttcagacrgaaattatag

SEQ ID NO: 22555 - DNA, 21 bp, Homo sapiens
ctaagaccagyaatagctggc

SEQ ID NO: 22556 - DNA, 21 bp, Homo sapiens
cttcaattgartgatgaaatt

SEQ ID NO: 22557 - DNA, 21 bp, Homo sapiens
actctggcaaycacaatgaga

SEQ ID NO: 22558 - DNA, 21 bp, Homo sapiens
ccctgctgggkacagtgatgt

SEQ ID NO: 22559 - DNA, 21 bp, Homo sapiens
cccacgtgcaygggaacggag

SEQ ID NO: 22560 - DNA, 21 bp, Homo sapiens
gcccagagatygcgccaacca

SEQ ID NO: 22561 - DNA, 21 bp, Homo sapiens
caggactgtgrgggcctggag

SEQ ID NO: 22562 - DNA, 21 bp, Homo sapiens
agcaaatcatyttcatgggtt

SEQ ID NO: 22563 - DNA, 21 bp, Homo sapiens
ttttaaataarccttccccaa

SEQ ID NO: 22564 - DNA, 21 bp, Homo sapiens
cacctcattgyctggaagccc

SEQ ID NO: 22565 - DNA, 21 bp, Homo sapiens
gaggggccctygtagagacaa

SEQ ID NO: 22566 - DNA, 21 bp, Homo sapiens
ccaagtcgggrcacaggagct

SEQ ID NO: 22567 - DNA, 21 bp, Homo sapiens
ctcctcctccmcagcagtgat

SEQ ID NO: 22568 - DNA, 21 bp, Homo sapiens
tccctaacagrgatacagaga

SEQ ID NO: 22569 - DNA, 21 bp, Homo sapiens
ctttggtgccrtctctcttgc

SEQ ID NO: 22570 - DNA, 21 bp, Homo sapiens
ggacagtgatmcttgaggact

SEQ ID NO: 22571 - DNA, 21 bp, Homo sapiens
gaaaatggcaygtgggtataa

SEQ ID NO: 22572 - DNA, 21 bp, Homo sapiens
caattatcctrtcatcagatg

SEQ ID NO: 22573 - DNA, 21 bp, Homo sapiens
ctgtggagcaraagggtggct

SEQ ID NO: 22574 - DNA, 21 bp, Homo sapiens
cagtcacagayctcattagta

SEQ ID NO: 22575 - DNA, 21 bp, Homo sapiens
cacctgaaagytgctaacctg

SEQ ID NO: 22576 - DNA, 21 bp, Homo sapiens
aggccacacamgccttcgaca

SEQ ID NO: 22577 - DNA, 21 bp, Homo sapiens
tctccaagccyggagctcggg

SEQ ID NO: 22578 - DNA, 21 bp, Homo sapiens
cttgaagccamaatgtagagc

SEQ ID NO: 22579 - DNA, 21 bp, Homo sapiens
cactctccccygggctctgat

SEQ ID NO: 22580 - DNA, 21 bp, Homo sapiens
agagccagcargatctcacgg

SEQ ID NO: 22581 - DNA, 21 bp, Homo sapiens
ctggctcccaycacaggaaca

SEQ ID NO: 22582 - DNA, 21 bp, Homo sapiens
aggtactctgrtttgggatac

SEQ ID NO: 22583 - DNA, 21 bp, Homo sapiens
gaaacactgcytagaatttct

SEQ ID NO: 22584 - DNA, 21 bp, Homo sapiens
taatggtatcrctgcctcacc

SEQ ID NO: 22585 - DNA, 21 bp, Homo sapiens
atttacgaagraagctcagta

SEQ ID NO: 22586 - DNA, 21 bp, Homo sapiens
acagtcatcckaaaagcccag

SEQ ID NO: 22587 - DNA, 21 bp, Homo sapiens
cagaagtcccrcgaagcaccc

SEQ ID NO: 22588 - DNA, 21 bp, Homo sapiens
gacgtatgggragcctcagaa

SEQ ID NO: 22589 - DNA, 21 bp, Homo sapiens
gtttccttcgraactggtact

SEQ ID NO: 22590 - DNA, 21 bp, Homo sapiens
acacagacacrtaagaaacta

SEQ ID NO: 22591 - DNA, 21 bp, Homo sapiens
tagttgttctyacactgctat

SEQ ID NO: 22592 - DNA, 21 bp, Homo sapiens
ttaatcttctyaccatgtgga

SEQ ID NO: 22593 - DNA, 21 bp, Homo sapiens
cctgggtctcrcctattcttg

SEQ ID NO: 22594 - DNA, 21 bp, Homo sapiens
gggttgctttrcccccaaatc

SEQ ID NO: 22595 - DNA, 21 bp, Homo sapiens
tgcatgttaaygacttatcca

SEQ ID NO: 22596 - DNA, 21 bp, Homo sapiens
gctaccagagytggaactaaa

SEQ ID NO: 22597 - DNA, 21 bp, Homo sapiens
tggagtagacrggacagaaaa

SEQ ID NO: 22598 - DNA, 21 bp, Homo sapiens
tttctagaggytcctgccctc

SEQ ID NO: 22599 - DNA, 21 bp, Homo sapiens
acatgtgtgargagagtgtca

SEQ ID NO: 22600 - DNA, 21 bp, Homo sapiens
ggtggatgtgyggtggcgtct

SEQ ID NO: 22601 - DNA, 21 bp, Homo sapiens
gcagatgaggygtctgctcag

SEQ ID NO: 22602 - DNA, 21 bp, Homo sapiens
ctttaaaaggycttcactgat

SEQ ID NO: 22603 - DNA, 21 bp, Homo sapiens
ctgactactcmcacggaggga

SEQ ID NO: 22604 - DNA, 21 bp, Homo sapiens
gcctcttgggrtcaagggccc

SEQ ID NO: 22605 - DNA, 21 bp, Homo sapiens
tgtaccatggyaggcagtaca

SEQ ID NO: 22606 - DNA, 21 bp, Homo sapiens
actgtgtgacrggcgagcggg

SEQ ID NO: 22607 - DNA, 21 bp, Homo sapiens
actgtgacatyggaacgtggc

SEQ ID NO: 22608 - DNA, 21 bp, Homo sapiens
cctggcattcytccactcaca

SEQ ID NO: 22609 - DNA, 21 bp, Homo sapiens
gaggggccccrgccattgacc

SEQ ID NO: 22610 - DNA, 21 bp, Homo sapiens
cgatctctccygggagtctgg

SEQ ID NO: 22611 - DNA, 21 bp, Homo sapiens
ttccataattyccccaattat

SEQ ID NO: 22612 - DNA, 21 bp, Homo sapiens
tagccctttakcttggatttt

SEQ ID NO: 22613 - DNA, 21 bp, Homo sapiens
aaaaagaaackttcaatataa

SEQ ID NO: 22614 - DNA, 21 bp, Homo sapiens
aacgtctccartgtaatgagg

SEQ ID NO: 22615 - DNA, 21 bp, Homo sapiens
gcaaacccagrgtttactgat

SEQ ID NO: 22616 - DNA, 21 bp, Homo sapiens
agaagctagcmgctgagttgg

SEQ ID NO: 22617 - DNA, 21 bp, Homo sapiens
atcagcattcrtgatttgttt

SEQ ID NO: 22618 - DNA, 21 bp, Homo sapiens
tcatgtaaatyataacacatt

SEQ ID NO: 22619 - DNA, 21 bp, Homo sapiens
taagatagaakagtgcagtca

SEQ ID NO: 22620 - DNA, 21 bp, Homo sapiens
tgctcaaccaygcaagcggga

SEQ ID NO: 22621 - DNA, 21 bp, Homo sapiens
tttgagtcatrtaagattggc

SEQ ID NO: 22622 - DNA, 21 bp, Homo sapiens
gcatgttcttygagtttgttt

SEQ ID NO: 22623 - DNA, 21 bp, Homo sapiens
tctgaaaatcracccacagtg

SEQ ID NO: 22624 - DNA, 21 bp, Homo sapiens
ttatctccagygtttaactag

SEQ ID NO: 22625 - DNA, 21 bp, Homo sapiens
aatgaagaacmagtcaagaac

SEQ ID NO: 22626 - DNA, 21 bp, Homo sapiens
tcaaatgttgrctcaataaag

SEQ ID NO: 22627 - DNA, 21 bp, Homo sapiens
taatcaggaakgtaaatcttt

SEQ ID NO: 22628 - DNA, 21 bp, Homo sapiens
tggtcacttarctgggaaaaa

SEQ ID NO: 22629 - DNA, 21 bp, Homo sapiens
tgttaaatatmatgttctgta

SEQ ID NO: 22630 - DNA, 21 bp, Homo sapiens
aaaaaaaaaamccctggattt

SEQ ID NO: 22631 - DNA, 21 bp, Homo sapiens
gaacaatgatmcagaaaatgg

SEQ ID NO: 22632 - DNA, 21 bp, Homo sapiens
catatgaaatrtacagtggta

SEQ ID NO: 22633 - DNA, 21 bp, Homo sapiens
tggccctgtgytaaatcaaca

SEQ ID NO: 22634 - DNA, 21 bp, Homo sapiens
ccactcagatrtgactatact

SEQ ID NO: 22635 - DNA, 21 bp, Homo sapiens
accgcaggacycttgcagttg

SEQ ID NO: 22636 - DNA, 21 bp, Homo sapiens
ggcatcacatygaatctagaa

SEQ ID NO: 22637 - DNA, 21 bp, Homo sapiens
tatcaaagcaygcaaaaatga

SEQ ID NO: 22638 - DNA, 21 bp, Homo sapiens
aagaggtctcrctgtacttaa

SEQ ID NO: 22639 - DNA, 21 bp, Homo sapiens
ttgtatgttaytctcttgcct

SEQ ID NO: 22640 - DNA, 21 bp, Homo sapiens
tgaaatcatcrttcaacatag

SEQ ID NO: 22641 - DNA, 21 bp, Homo sapiens
tgtccacaatrcgagtctaga

SEQ ID NO: 22642 - DNA, 21 bp, Homo sapiens
acagaaaaatmgaagagagaa

SEQ ID NO: 22643 - DNA, 21 bp, Homo sapiens
tttcttgcatmcaaattatgg

SEQ ID NO: 22644 - DNA, 21 bp, Homo sapiens
aacaaggaaaygtatattctt

SEQ ID NO: 22645 - DNA, 21 bp, Homo sapiens
gtcattctcayatttcacata

SEQ ID NO: 22646 - DNA, 21 bp, Homo sapiens
agagggtgggkctaatgtcag

SEQ ID NO: 22647 - DNA, 21 bp, Homo sapiens
atgtcacttartatctctgcg

SEQ ID NO: 22648 - DNA, 21 bp, Homo sapiens
gtccaagaaakgaatccatga

SEQ ID NO: 22649 - DNA, 21 bp, Homo sapiens
gacactgattkgtctttatct

SEQ ID NO: 22650 - DNA, 21 bp, Homo sapiens
cacgcaggacmtgctgcattg

SEQ ID NO: 22651 - DNA, 21 bp, Homo sapiens
gaaaagggtcraaaggatgca

SEQ ID NO: 22652 - DNA, 21 bp, Homo sapiens
attaatgagtrgtcttaagtt

SEQ ID NO: 22653 - DNA, 21 bp, Homo sapiens
ctaaaattccytgaaacaaat

SEQ ID NO: 22654 - DNA, 21 bp, Homo sapiens
agacacagttmttataattca

SEQ ID NO: 22655 - DNA, 21 bp, Homo sapiens
atttcacatcrtgtcttattt

SEQ ID NO: 22656 - DNA, 21 bp, Homo sapiens
aaagaagaaayagtcgaactt

SEQ ID NO: 22657 - DNA, 21 bp, Homo sapiens
ctttccctgarcagaaggact

SEQ ID NO: 22658 - DNA, 21 bp, Homo sapiens
catttccaggrtctccccatt

SEQ ID NO: 22659 - DNA, 21 bp, Homo sapiens
aaaccaactayagcttagtgc

SEQ ID NO: 22660 - DNA, 21 bp, Homo sapiens
acagaatgagyctggtggggg

SEQ ID NO: 22661 - DNA, 21 bp, Homo sapiens
aagctgtgctrggaaatgcct

SEQ ID NO: 22662 - DNA, 21 bp, Homo sapiens
gcttaaccagkgtttgtggca

SEQ ID NO: 22663 - DNA, 21 bp, Homo sapiens
tgagaagctgrcgatgttgct

SEQ ID NO: 22664 - DNA, 21 bp, Homo sapiens
cttagtctcaytctgtcaatg

SEQ ID NO: 22665 - DNA, 21 bp, Homo sapiens
cattttgaacrcttctgtgcc

SEQ ID NO: 22666 - DNA, 21 bp, Homo sapiens
ggagaaatggyggggagtgaa

SEQ ID NO: 22667 - DNA, 21 bp, Homo sapiens
ggacaccacarttctaaaata

SEQ ID NO: 22668 - DNA, 21 bp, Homo sapiens
cgtgcgtccartgtaagtgtg

SEQ ID NO: 22669 - DNA, 21 bp, Homo sapiens
aatacactaayggggcagaaa

SEQ ID NO: 22670 - DNA, 21 bp, Homo sapiens
ataatgccttktactgatttg

SEQ ID NO: 22671 - DNA, 21 bp, Homo sapiens
tgtcaccaaamtttaggacag

SEQ ID NO: 22672 - DNA, 21 bp, Homo sapiens
ctctgcatttrtttcttatgg

SEQ ID NO: 22673 - DNA, 21 bp, Homo sapiens
atatttgttamattagaaaaa

SEQ ID NO: 22674 - DNA, 21 bp, Homo sapiens
tttcacatggmcttatgtctg

SEQ ID NO: 22675 - DNA, 21 bp, Homo sapiens
ttatcagctcyctttgacaga

SEQ ID NO: 22676 - DNA, 21 bp, Homo sapiens
taaactattayaaaactctgc

SEQ ID NO: 22677 - DNA, 21 bp, Homo sapiens
ttaatccagcrgaaccagagt

SEQ ID NO: 22678 - DNA, 21 bp, Homo sapiens
ttaaaagcctmgtgacctctt

SEQ ID NO: 22679 - DNA, 21 bp, Homo sapiens
cttctcagaayagggtttttt

SEQ ID NO: 22680 - DNA, 21 bp, Homo sapiens
gcaaagttttkgttgatgcaa

SEQ ID NO: 22681 - DNA, 21 bp, Homo sapiens
tgcaaattttrcaccccatta

SEQ ID NO: 22682 - DNA, 21 bp, Homo sapiens
agtacaagcaraagtgatatg

SEQ ID NO: 22683 - DNA, 21 bp, Homo sapiens
ttttctgtgtrccagtctatt

SEQ ID NO: 22684 - DNA, 21 bp, Homo sapiens
aaaaaggcccrgacccatcta

SEQ ID NO: 22685 - DNA, 21 bp, Homo sapiens
attgaaccaaygctaacattc

SEQ ID NO: 22686 - DNA, 21 bp, Homo sapiens
gagatagttcmatgccttttt

SEQ ID NO: 22687 - DNA, 21 bp, Homo sapiens
ccatcatggtrtaggcaagtt

SEQ ID NO: 22688 - DNA, 21 bp, Homo sapiens
gcccccctttytacacagaat

SEQ ID NO: 22689 - DNA, 21 bp, Homo sapiens
aagtttctaaraaatgatatg

SEQ ID NO: 22690 - DNA, 21 bp, Homo sapiens
atggaatttargttttgatga

SEQ ID NO: 22691 - DNA, 21 bp, Homo sapiens
aaccttgatgrtatttttctt

SEQ ID NO: 22692 - DNA, 21 bp, Homo sapiens
ttcattcagcrtactaggttt

SEQ ID NO: 22693 - DNA, 21 bp, Homo sapiens
aaaataaggtrtatttataat

SEQ ID NO: 22694 - DNA, 21 bp, Homo sapiens
ctgccaggaarggaggatctt

SEQ ID NO: 22695 - DNA, 21 bp, Homo sapiens
attttcttcartttaatccaa

SEQ ID NO: 22696 - DNA, 21 bp, Homo sapiens
aagaggaaaamtaaccaagac

SEQ ID NO: 22697 - DNA, 21 bp, Homo sapiens
gtaaaaaccayggccttctca

SEQ ID NO: 22698 - DNA, 21 bp, Homo sapiens
ctacccatatkgagtaatttg

SEQ ID NO: 22699 - DNA, 21 bp, Homo sapiens
ctctccatacrtattaaataa

SEQ ID NO: 22700 - DNA, 21 bp, Homo sapiens
ctactcactayaaactcactt

SEQ ID NO: 22701 - DNA, 21 bp, Homo sapiens
aaggtattatyttctacattg

SEQ ID NO: 22702 - DNA, 21 bp, Homo sapiens
cagagtacccrtcctgtaact

SEQ ID NO: 22703 - DNA, 21 bp, Homo sapiens
tttaacaaatmatatctttaa

SEQ ID NO: 22704 - DNA, 21 bp, Homo sapiens
tggttaggccraattatctaa

SEQ ID NO: 22705 - DNA, 21 bp, Homo sapiens
gacaattgctyattgcaaacc

SEQ ID NO: 22706 - DNA, 21 bp, Homo sapiens
gaaagttctcytctgaccctg

SEQ ID NO: 22707 - DNA, 21 bp, Homo sapiens
agtggaaaggracattcacat

SEQ ID NO: 22708 - DNA, 21 bp, Homo sapiens
ttactcttttrcacctattgt

SEQ ID NO: 22709 - DNA, 21 bp, Homo sapiens
gcactactatytggatttctc

SEQ ID NO: 22710 - DNA, 21 bp, Homo sapiens
acaggactcartaatatacgt

SEQ ID NO: 22711 - DNA, 21 bp, Homo sapiens
catctactttraaaggttcac

SEQ ID NO: 22712 - DNA, 21 bp, Homo sapiens
tttctggatckattctctaac

SEQ ID NO: 22713 - DNA, 21 bp, Homo sapiens
agcagtccatratatggctat

SEQ ID NO: 22714 - DNA, 21 bp, Homo sapiens
aatgagagtcraatacatatg

SEQ ID NO: 22715 - DNA, 21 bp, Homo sapiens
aatgagtccaygtgcctaacc

SEQ ID NO: 22716 - DNA, 21 bp, Homo sapiens
cctttgggcaygtttgcagga

SEQ ID NO: 22717 - DNA, 21 bp, Homo sapiens
cataggaatgyaatatatcat

SEQ ID NO: 22718 - DNA, 21 bp, Homo sapiens
gctaagccacrgagatttcag

SEQ ID NO: 22719 - DNA, 21 bp, Homo sapiens
cttaagagctytgtctcaata

SEQ ID NO: 22720 - DNA, 21 bp, Homo sapiens
aatgatctagmaggtgtcata

SEQ ID NO: 22721 - DNA, 21 bp, Homo sapiens
ttttgtttttktttttttttt

SEQ ID NO: 22722 - DNA, 21 bp, Homo sapiens
agactcagaaytgaaaactgg

SEQ ID NO: 22723 - DNA, 21 bp, Homo sapiens
ttaaatgctgmcttctttagt

SEQ ID NO: 22724 - DNA, 21 bp, Homo sapiens
ggggcccttgrgaaatttgaa

SEQ ID NO: 22725 - DNA, 21 bp, Homo sapiens
tactgtgatgmacaaaagaag

SEQ ID NO: 22726 - DNA, 21 bp, Homo sapiens
gggaattgctktggatctctg

SEQ ID NO: 22727 - DNA, 21 bp, Homo sapiens
caataacaacraacctttgtt

SEQ ID NO: 22728 - DNA, 21 bp, Homo sapiens
tcaggaacacmtctttcttcc

SEQ ID NO: 22729 - DNA, 21 bp, Homo sapiens
aaggaaggtgmaagcatttaa

SEQ ID NO: 22730 - DNA, 21 bp, Homo sapiens
ggtgaatatcraagacatttt

SEQ ID NO: 22731 - DNA, 21 bp, Homo sapiens
tgcgggttcakagttttccta

SEQ ID NO: 22732 - DNA, 21 bp, Homo sapiens
cagaaatgctractttcagaa

SEQ ID NO: 22733 - DNA, 21 bp, Homo sapiens
tcagaacacaktaaatgacaa

SEQ ID NO: 22734 - DNA, 21 bp, Homo sapiens
atgattctctyccatgcgcat

SEQ ID NO: 22735 - DNA, 21 bp, Homo sapiens
tagtgaaggamagatcagttt

SEQ ID NO: 22736 - DNA, 21 bp, Homo sapiens
tttaaaaaatrattgcaggct

SEQ ID NO: 22737 - DNA, 21 bp, Homo sapiens
tttttaccaarcttgagttga

SEQ ID NO: 22738 - DNA, 21 bp, Homo sapiens
tgtatattctyctgctgaaca

SEQ ID NO: 22739 - DNA, 21 bp, Homo sapiens
taatctgggtrttagatgcta

SEQ ID NO: 22740 - DNA, 21 bp, Homo sapiens
aactatggtaytatatatgag

SEQ ID NO: 22741 - DNA, 21 bp, Homo sapiens
ccaaaccaaamcaaaacacaa

SEQ ID NO: 22742 - DNA, 21 bp, Homo sapiens
caccccgtgtrtaattttgaa

SEQ ID NO: 22743 - DNA, 21 bp, Homo sapiens
aagttgaaaamcactgtcagg

SEQ ID NO: 22744 - DNA, 21 bp, Homo sapiens
tcaattttctrtgatccattt

SEQ ID NO: 22745 - DNA, 21 bp, Homo sapiens
taggcatctcygtctcctcca

SEQ ID NO: 22746 - DNA, 21 bp, Homo sapiens
tctttaaatgyagacagtggg

SEQ ID NO: 22747 - DNA, 21 bp, Homo sapiens
agctggaacaytggagacctt

SEQ ID NO: 22748 - DNA, 21 bp, Homo sapiens
cagcttggctygcagaaattc

SEQ ID NO: 22749 - DNA, 21 bp, Homo sapiens
atgattacgtrtaataattgt

SEQ ID NO: 22750 - DNA, 21 bp, Homo sapiens
gccccttcackgagaacaaac

SEQ ID NO: 22751 - DNA, 21 bp, Homo sapiens
gtgcgattgtrctattggata

SEQ ID NO: 22752 - DNA, 21 bp, Homo sapiens
tactcaggcaygagcacccgc

SEQ ID NO: 22753 - DNA, 21 bp, Homo sapiens
ctaagctgtcmtttcagaaga

SEQ ID NO: 22754 - DNA, 21 bp, Homo sapiens
gaatgaagctkagtgtttccc

SEQ ID NO: 22755 - DNA, 21 bp, Homo sapiens
atttctcatgygccttcccat

SEQ ID NO: 22756 - DNA, 21 bp, Homo sapiens
agaggaaaggytttgctctcc

SEQ ID NO: 22757 - DNA, 21 bp, Homo sapiens
taggcccatcytacatccagg

SEQ ID NO: 22758 - DNA, 21 bp, Homo sapiens
cacagcattgmacggggcgga

SEQ ID NO: 22759 - DNA, 21 bp, Homo sapiens
ccatgaaaacrcagtggggga

SEQ ID NO: 22760 - DNA, 21 bp, Homo sapiens
taatgtgtcaygtaaaaatta

SEQ ID NO: 22761 - DNA, 21 bp, Homo sapiens
gacagggtagrctaacaactg

SEQ ID NO: 22762 - DNA, 21 bp, Homo sapiens
tattgtcttartcccagaaag

SEQ ID NO: 22763 - DNA, 21 bp, Homo sapiens
tgtcagcctgyattttcatca

SEQ ID NO: 22764 - DNA, 21 bp, Homo sapiens
catttaaatayttactgtgtg

SEQ ID NO: 22765 - DNA, 21 bp, Homo sapiens
gtacctatgaygtacgtgggc

SEQ ID NO: 22766 - DNA, 21 bp, Homo sapiens
gaacatatttygtaaatgtgg

SEQ ID NO: 22767 - DNA, 21 bp, Homo sapiens
ttctaggaccrtgtcatacat

SEQ ID NO: 22768 - DNA, 21 bp, Homo sapiens
ccagtaggtcmggccagcttc

SEQ ID NO: 22769 - DNA, 21 bp, Homo sapiens
tttgcatcatragaaagatta

SEQ ID NO: 22770 - DNA, 21 bp, Homo sapiens
ttgcagcaaaygaaaggtaaa

SEQ ID NO: 22771 - DNA, 21 bp, Homo sapiens
ggtccattgtygctgagaata

SEQ ID NO: 22772 - DNA, 21 bp, Homo sapiens
tatatgattcygcgttaaatt

SEQ ID NO: 22773 - DNA, 21 bp, Homo sapiens
attaacgaatygatagtgata

SEQ ID NO: 22774 - DNA, 21 bp, Homo sapiens
agaatcccatygaggatacaa

SEQ ID NO: 22775 - DNA, 21 bp, Homo sapiens
aaacacaatcyttttaaagca

SEQ ID NO: 22776 - DNA, 21 bp, Homo sapiens
tacagctaatrctgtaaagag

SEQ ID NO: 22777 - DNA, 21 bp, Homo sapiens
agggagcatgygtccatcagt

SEQ ID NO: 22778 - DNA, 21 bp, Homo sapiens
gtgattccacygtacttcaaa

SEQ ID NO: 22779 - DNA, 21 bp, Homo sapiens
tctgcaagagraggtttgggt

SEQ ID NO: 22780 - DNA, 21 bp, Homo sapiens
tgggggcatcyggccaagtct

SEQ ID NO: 22781 - DNA, 21 bp, Homo sapiens
gtgcaaatcartgcagatggt

SEQ ID NO: 22782 - DNA, 21 bp, Homo sapiens
aaggtagacgrtcatgtcaat

SEQ ID NO: 22783 - DNA, 21 bp, Homo sapiens
gacttgagggrccaaaattcc

SEQ ID NO: 22784 - DNA, 21 bp, Homo sapiens
aaactcaagcyggctatcaaa

SEQ ID NO: 22785 - DNA, 21 bp, Homo sapiens
catttttgtcyggaacccagg

SEQ ID NO: 22786 - DNA, 21 bp, Homo sapiens
ctgctccatcyggggacatcc

SEQ ID NO: 22787 - DNA, 21 bp, Homo sapiens
tggcatgtgaygtcaacacca

SEQ ID NO: 22788 - DNA, 21 bp, Homo sapiens
tatttttatgytaatgaatgt

SEQ ID NO: 22789 - DNA, 21 bp, Homo sapiens
cagagtgtgarcatgtggtca

SEQ ID NO: 22790 - DNA, 21 bp, Homo sapiens
tctcacaggamtcacctgggg

SEQ ID NO: 22791 - DNA, 21 bp, Homo sapiens
aaggagtttcyggctgttgtc

SEQ ID NO: 22792 - DNA, 21 bp, Homo sapiens
atggatattaygagctctcta

SEQ ID NO: 22793 - DNA, 21 bp, Homo sapiens
tctaggttggracagcaaaga

SEQ ID NO: 22794 - DNA, 21 bp, Homo sapiens
ttaggcccttytgctcttggc

SEQ ID NO: 22795 - DNA, 21 bp, Homo sapiens
tgccaaggtcyctcgataaaa

SEQ ID NO: 22796 - DNA, 21 bp, Homo sapiens
acatagtataytaatatatta

SEQ ID NO: 22797 - DNA, 21 bp, Homo sapiens
cttgcccccayttcacagatg

SEQ ID NO: 22798 - DNA, 21 bp, Homo sapiens
ggttcttattrggaatttgga

SEQ ID NO: 22799 - DNA, 21 bp, Homo sapiens
cagtgctgaartggtcaacag

SEQ ID NO: 22800 - DNA, 21 bp, Homo sapiens
tatgtccatgrgtttcttatt

SEQ ID NO: 22801 - DNA, 21 bp, Homo sapiens
attatgtctayttccttcctg

SEQ ID NO: 22802 - DNA, 21 bp, Homo sapiens
agactaatacrgtaaatgagc

SEQ ID NO: 22803 - DNA, 21 bp, Homo sapiens
cactgttttaycaaaccagtt

SEQ ID NO: 22804 - DNA, 21 bp, Homo sapiens
ctcttaatackcatccaacaa

SEQ ID NO: 22805 - DNA, 21 bp, Homo sapiens
cctgagctaaygtggttctgc

SEQ ID NO: 22806 - DNA, 21 bp, Homo sapiens
ctaccaaaccytgtaaaaaaa

SEQ ID NO: 22807 - DNA, 21 bp, Homo sapiens
ttcgagggccragataaaaat

SEQ ID NO: 22808 - DNA, 21 bp, Homo sapiens
cacatctccartggccttcat

SEQ ID NO: 22809 - DNA, 21 bp, Homo sapiens
ttcatatgtaygggttgtttc

SEQ ID NO: 22810 - DNA, 21 bp, Homo sapiens
ttcaaaaactrgaagcaactc

SEQ ID NO: 22811 - DNA, 21 bp, Homo sapiens
ctgcccctaarggagttccag

SEQ ID NO: 22812 - DNA, 21 bp, Homo sapiens
cagcttaccartgacggtctt

SEQ ID NO: 22813 - DNA, 21 bp, Homo sapiens
tacatccagcrtgacagcgcc

SEQ ID NO: 22814 - DNA, 21 bp, Homo sapiens
ctcatggcctyggctggaaga

SEQ ID NO: 22815 - DNA, 21 bp, Homo sapiens
gtttctcctcrgagaacagaa

SEQ ID NO: 22816 - DNA, 21 bp, Homo sapiens
ctgaaatgacygtctttaatc

SEQ ID NO: 22817 - DNA, 21 bp, Homo sapiens
aaatatgtgcrtatattcagt

SEQ ID NO: 22818 - DNA, 21 bp, Homo sapiens
aacttcaatayaaacagtatc

SEQ ID NO: 22819 - DNA, 21 bp, Homo sapiens
cagaataggtkaggaaatact

SEQ ID NO: 22820 - DNA, 21 bp, Homo sapiens
caaggacaatkatcatgaatc

SEQ ID NO: 22821 - DNA, 21 bp, Homo sapiens
cactggtaatrgttgattttc

SEQ ID NO: 22822 - DNA, 21 bp, Homo sapiens
gaagttgaatrgttttaaggc

SEQ ID NO: 22823 - DNA, 21 bp, Homo sapiens
agtctcacaaycagattttcc

SEQ ID NO: 22824 - DNA, 21 bp, Homo sapiens
ttgaacctgayaatattcaaa

SEQ ID NO: 22825 - DNA, 21 bp, Homo sapiens
ctgacaatacraggtaaagga

SEQ ID NO: 22826 - DNA, 21 bp, Homo sapiens
tactatggttyatttgtgatg

SEQ ID NO: 22827 - DNA, 21 bp, Homo sapiens
tgacttcgtayccattaagta

SEQ ID NO: 22828 - DNA, 21 bp, Homo sapiens
aaagccaagayaggaaagttt

SEQ ID NO: 22829 - DNA, 21 bp, Homo sapiens
agatcaatggyccagccactt

SEQ ID NO: 22830 - DNA, 21 bp, Homo sapiens
cagatgatgartgttgataca

SEQ ID NO: 22831 - DNA, 21 bp, Homo sapiens
caggttataaktgaaatggca

SEQ ID NO: 22832 - DNA, 21 bp, Homo sapiens
gtaaaatgggraagtagcatc

SEQ ID NO: 22833 - DNA, 21 bp, Homo sapiens
cagacgttctmggattccaaa

SEQ ID NO: 22834 - DNA, 21 bp, Homo sapiens
tgggaattaartaacacatga

SEQ ID NO: 22835 - DNA, 21 bp, Homo sapiens
gagacaccttmttttaaaact

SEQ ID NO: 22836 - DNA, 21 bp, Homo sapiens
acgcgggccargctgggctac

SEQ ID NO: 22837 - DNA, 21 bp, Homo sapiens
ctggagaacartgataagaac

SEQ ID NO: 22838 - DNA, 21 bp, Homo sapiens
aatgcggcctrgtaagtgcca

SEQ ID NO: 22839 - DNA, 21 bp, Homo sapiens
agctccagtgrttgctccaag

SEQ ID NO: 22840 - DNA, 21 bp, Homo sapiens
gttctgcctamtcttgaatat

SEQ ID NO: 22841 - DNA, 21 bp, Homo sapiens
ttgattattaygaggaatgat

SEQ ID NO: 22842 - DNA, 21 bp, Homo sapiens
cctcataagcrcatgtgtgca

SEQ ID NO: 22843 - DNA, 21 bp, Homo sapiens
tatccgtaaaycccgagagat

SEQ ID NO: 22844 - DNA, 21 bp, Homo sapiens
cctggctctgytttggatgca

SEQ ID NO: 22845 - DNA, 21 bp, Homo sapiens
cgtgggcctckggggcctgag

SEQ ID NO: 22846 - DNA, 21 bp, Homo sapiens
ctcatgggcaragtaacccca

SEQ ID NO: 22847 - DNA, 21 bp, Homo sapiens
accctctgtcrgtgaggagta

SEQ ID NO: 22848 - DNA, 21 bp, Homo sapiens
tatgcacaagkctactgacac

SEQ ID NO: 22849 - DNA, 21 bp, Homo sapiens
gggttaatccrtagctacttg

SEQ ID NO: 22850 - DNA, 21 bp, Homo sapiens
gtaacacaccrtaggtggtgg

SEQ ID NO: 22851 - DNA, 21 bp, Homo sapiens
ttatgcttgtrcatggccatg

SEQ ID NO: 22852 - DNA, 21 bp, Homo sapiens
ctgatcatctkcagacattct

SEQ ID NO: 22853 - DNA, 21 bp, Homo sapiens
gatggcatctyagctttgcat

SEQ ID NO: 22854 - DNA, 21 bp, Homo sapiens
tccttctctgrgcctttgata

SEQ ID NO: 22855 - DNA, 21 bp, Homo sapiens
atgcagctgtrcctgtagaaa

SEQ ID NO: 22856 - DNA, 21 bp, Homo sapiens
catgaaaacaracttttcaca

SEQ ID NO: 22857 - DNA, 21 bp, Homo sapiens
tatcctatgcrtatagcaata

SEQ ID NO: 22858 - DNA, 21 bp, Homo sapiens
agaagaggcartatttgtagt

SEQ ID NO: 22859 - DNA, 21 bp, Homo sapiens
tcaactcgctygactggagcc

SEQ ID NO: 22860 - DNA, 21 bp, Homo sapiens
ttaatgccacmattaaagggt

SEQ ID NO: 22861 - DNA, 21 bp, Homo sapiens
cttttagttgyggtgttaggt

SEQ ID NO: 22862 - DNA, 21 bp, Homo sapiens
aaagtgatttrccaagagttt

SEQ ID NO: 22863 - DNA, 21 bp, Homo sapiens
ggtggagcgtrctggggatgg

SEQ ID NO: 22864 - DNA, 21 bp, Homo sapiens
ctgctgctgtyactcagaaga

SEQ ID NO: 22865 - DNA, 21 bp, Homo sapiens
cttcccaaacraaagatgtga

SEQ ID NO: 22866 - DNA, 21 bp, Homo sapiens
aaaccggcaayagtcaggtgg

SEQ ID NO: 22867 - DNA, 21 bp, Homo sapiens
ggtttgtcttyattctgaatt

SEQ ID NO: 22868 - DNA, 21 bp, Homo sapiens
attagttttcrgagcaatgcc

SEQ ID NO: 22869 - DNA, 21 bp, Homo sapiens
tattgcaaaayaggtctcact

SEQ ID NO: 22870 - DNA, 21 bp, Homo sapiens
ctccttcctcrtgggaaggag

SEQ ID NO: 22871 - DNA, 21 bp, Homo sapiens
cgaagaaatgyacacagatac

SEQ ID NO: 22872 - DNA, 21 bp, Homo sapiens
gtatccctctraagttgtttc

SEQ ID NO: 22873 - DNA, 21 bp, Homo sapiens
acaggccaagraatgcctcaa

SEQ ID NO: 22874 - DNA, 21 bp, Homo sapiens
atctataagcmgtaatgtgcg

SEQ ID NO: 22875 - DNA, 21 bp, Homo sapiens
cgtcttccaayggttctctgt

SEQ ID NO: 22876 - DNA, 21 bp, Homo sapiens
tgggaaaaggkgagtgtggag

SEQ ID NO: 22877 - DNA, 21 bp, Homo sapiens
gggagaaagayaaacaaaggg

SEQ ID NO: 22878 - DNA, 21 bp, Homo sapiens
gcctttccgcrctcttgttcc

SEQ ID NO: 22879 - DNA, 21 bp, Homo sapiens
tctgggaacaraagtggtgat

SEQ ID NO: 22880 - DNA, 21 bp, Homo sapiens
acacacatccycaatcactga

SEQ ID NO: 22881 - DNA, 21 bp, Homo sapiens
aaatgaggctmttttcttatg

SEQ ID NO: 22882 - DNA, 21 bp, Homo sapiens
gatatttgccrtgttggcctc

SEQ ID NO: 22883 - DNA, 21 bp, Homo sapiens
tgaacagttgyagaatctaca

SEQ ID NO: 22884 - DNA, 21 bp, Homo sapiens
caaacctgaarggtggcccag

SEQ ID NO: 22885 - DNA, 21 bp, Homo sapiens
tccatcaagtmaagtcactct

SEQ ID NO: 22886 - DNA, 21 bp, Homo sapiens
tgatcccttgyacaggtctgc

SEQ ID NO: 22887 - DNA, 21 bp, Homo sapiens
cttaggcgacyccactctgag

SEQ ID NO: 22888 - DNA, 21 bp, Homo sapiens
aggaacaactrttgacatctg

SEQ ID NO: 22889 - DNA, 21 bp, Homo sapiens
tgtctttggaraatatcaaga

SEQ ID NO: 22890 - DNA, 21 bp, Homo sapiens
cctagagaaayaggagaacgg

SEQ ID NO: 22891 - DNA, 21 bp, Homo sapiens
tcatgggcaaytgtcacccat

SEQ ID NO: 22892 - DNA, 21 bp, Homo sapiens
gctggcatttmaataagcaaa

SEQ ID NO: 22893 - DNA, 21 bp, Homo sapiens
gtgggagaatrggcaggtaca

SEQ ID NO: 22894 - DNA, 21 bp, Homo sapiens
ggaacctattyggggcaagat

SEQ ID NO: 22895 - DNA, 21 bp, Homo sapiens
tccagcagggmcccgtgctgc

SEQ ID NO: 22896 - DNA, 21 bp, Homo sapiens
cctccaaggcygtgtgcactg

SEQ ID NO: 22897 - DNA, 21 bp, Homo sapiens
acagcattgayggctgggttg

SEQ ID NO: 22898 - DNA, 21 bp, Homo sapiens
tatgatatgcycaagaaaaca

SEQ ID NO: 22899 - DNA, 21 bp, Homo sapiens
gatattacaakagcacaaaaa

SEQ ID NO: 22900 - DNA, 21 bp, Homo sapiens
acttcacaggraagcactttc

SEQ ID NO: 22901 - DNA, 21 bp, Homo sapiens
cagggggatayggcagggtgg

SEQ ID NO: 22902 - DNA, 21 bp, Homo sapiens
gaaagaacagkggtcccttgg

SEQ ID NO: 22903 - DNA, 21 bp, Homo sapiens
attttgttcayccggccccat

SEQ ID NO: 22904 - DNA, 21 bp, Homo sapiens
attaaacaaakgagcaggtcc

SEQ ID NO: 22905 - DNA, 21 bp, Homo sapiens
ctgcagcactygctatagcac

SEQ ID NO: 22906 - DNA, 21 bp, Homo sapiens
tgacagtttgkgggacacaaa

SEQ ID NO: 22907 - DNA, 21 bp, Homo sapiens
ccaatatttcrctgcttcctg

SEQ ID NO: 22908 - DNA, 21 bp, Homo sapiens
agaattataaytatttgagtt

SEQ ID NO: 22909 - DNA, 21 bp, Homo sapiens
aaagatgggargggagtgttt

SEQ ID NO: 22910 - DNA, 21 bp, Homo sapiens
gtataactttrggatctttat

SEQ ID NO: 22911 - DNA, 21 bp, Homo sapiens
ttcgtcatctytaaaatggga

SEQ ID NO: 22912 - DNA, 21 bp, Homo sapiens
tgggaatctcrgccacaggag

SEQ ID NO: 22913 - DNA, 21 bp, Homo sapiens
gggaattttcrtaagaaaact

SEQ ID NO: 22914 - DNA, 21 bp, Homo sapiens
aaatactcackgctttgaaag

SEQ ID NO: 22915 - DNA, 21 bp, Homo sapiens
aacaagccagrggtcctaatt

SEQ ID NO: 22916 - DNA, 21 bp, Homo sapiens
gctgctccacygtctccccag

SEQ ID NO: 22917 - DNA, 21 bp, Homo sapiens
gataactttaygtcagcataa

SEQ ID NO: 22918 - DNA, 21 bp, Homo sapiens
atgttcactcyacaattccct

SEQ ID NO: 22919 - DNA, 21 bp, Homo sapiens
ttgtccaacaytgaactgagt

SEQ ID NO: 22920 - DNA, 21 bp, Homo sapiens
acctactcctmggggcaaaga

SEQ ID NO: 22921 - DNA, 21 bp, Homo sapiens
ggtgtggtgartcttgtagtc

SEQ ID NO: 22922 - DNA, 21 bp, Homo sapiens
atatgccctamgcacaaggca

SEQ ID NO: 22923 - DNA, 21 bp, Homo sapiens
cctacctataygttaagatct

SEQ ID NO: 22924 - DNA, 21 bp, Homo sapiens
ccattgtgaaytcctacagag

SEQ ID NO: 22925 - DNA, 21 bp, Homo sapiens
agcaacctttrgacaatttgt

SEQ ID NO: 22926 - DNA, 21 bp, Homo sapiens
gacacaaacaytcagtctacg

SEQ ID NO: 22927 - DNA, 21 bp, Homo sapiens
cacttgccgcrtgccggggct

SEQ ID NO: 22928 - DNA, 21 bp, Homo sapiens
tcctgctgccrcagacctgat

SEQ ID NO: 22929 - DNA, 21 bp, Homo sapiens
aaactgcattycaagggaggg

SEQ ID NO: 22930 - DNA, 21 bp, Homo sapiens
gtgatggcatyggttttctca

SEQ ID NO: 22931 - DNA, 21 bp, Homo sapiens
ttgagggaagyggacaattgc

SEQ ID NO: 22932 - DNA, 21 bp, Homo sapiens
cagaaacgaayctagatctct

SEQ ID NO: 22933 - DNA, 21 bp, Homo sapiens
tagccatgaayggatcttgga

SEQ ID NO: 22934 - DNA, 21 bp, Homo sapiens
cttttaaatgrgcagagtgtt

SEQ ID NO: 22935 - DNA, 21 bp, Homo sapiens
accatcctgcrtctcagaggt

SEQ ID NO: 22936 - DNA, 21 bp, Homo sapiens
tctctgcagcycttggtattt

SEQ ID NO: 22937 - DNA, 21 bp, Homo sapiens
tctcctccagractgccttag

SEQ ID NO: 22938 - DNA, 21 bp, Homo sapiens
gtcttgggtgytacatgttgt

SEQ ID NO: 22939 - DNA, 21 bp, Homo sapiens
cattcaagtgytgggaaaaca

SEQ ID NO: 22940 - DNA, 21 bp, Homo sapiens
tagtacttaartatttatgtg

SEQ ID NO: 22941 - DNA, 21 bp, Homo sapiens
atgttctgatyctaacttcgg

SEQ ID NO: 22942 - DNA, 21 bp, Homo sapiens
tataagcacaygctctttctt

SEQ ID NO: 22943 - DNA, 21 bp, Homo sapiens
tggttctgggycctatctacg

SEQ ID NO: 22944 - DNA, 21 bp, Homo sapiens
tatatggtcaytgaaacatac

SEQ ID NO: 22945 - DNA, 21 bp, Homo sapiens
gatctctttgytcaggcttct

SEQ ID NO: 22946 - DNA, 21 bp, Homo sapiens
tcctttgcctrtaagtgactg

SEQ ID NO: 22947 - DNA, 21 bp, Homo sapiens
tgttgagattrgaaaggtgag

SEQ ID NO: 22948 - DNA, 21 bp, Homo sapiens
ttatatgtatyctttttttca

SEQ ID NO: 22949 - DNA, 21 bp, Homo sapiens
tggccattctygtctgtatgt

SEQ ID NO: 22950 - DNA, 21 bp, Homo sapiens
tgcagtgataycacaatctat

SEQ ID NO: 22951 - DNA, 21 bp, Homo sapiens
cctgggcaccrtctcagtccc

SEQ ID NO: 22952 - DNA, 21 bp, Homo sapiens
aagcttacccrtgccctgtgc

SEQ ID NO: 22953 - DNA, 21 bp, Homo sapiens
ttaagatacaycccatacttc

SEQ ID NO: 22954 - DNA, 21 bp, Homo sapiens
ctagtcccctrcccagagggt

SEQ ID NO: 22955 - DNA, 21 bp, Homo sapiens
tgcccagaacrccctctcctc

SEQ ID NO: 22956 - DNA, 21 bp, Homo sapiens
tccaaggcagrcgaccagtat

SEQ ID NO: 22957 - DNA, 21 bp, Homo sapiens
gcactcaaccragtccctgtg

SEQ ID NO: 22958 - DNA, 21 bp, Homo sapiens
aggggtatgcraggaaaagat

SEQ ID NO: 22959 - DNA, 21 bp, Homo sapiens
gggatgaagcrggggcgtctg

SEQ ID NO: 22960 - DNA, 21 bp, Homo sapiens
cggggggtgtyggagggtagg

SEQ ID NO: 22961 - DNA, 21 bp, Homo sapiens
ttccagctgcygagccgggga

SEQ ID NO: 22962 - DNA, 21 bp, Homo sapiens
gagaggcagtrgtcagaggta

SEQ ID NO: 22963 - DNA, 21 bp, Homo sapiens
taaggctgggrcattagggac

SEQ ID NO: 22964 - DNA, 21 bp, Homo sapiens
ttgcacagcarctcaagccac

SEQ ID NO: 22965 - DNA, 21 bp, Homo sapiens
aacagtgctgrccatctgtag

SEQ ID NO: 22966 - DNA, 21 bp, Homo sapiens
gcagctttatrtgccaattag

SEQ ID NO: 22967 - DNA, 21 bp, Homo sapiens
tcagtttcctyatctgtcaaa

SEQ ID NO: 22968 - DNA, 21 bp, Homo sapiens
aaagacatttmtccccagggg

SEQ ID NO: 22969 - DNA, 21 bp, Homo sapiens
agattaggagracttgaggag

SEQ ID NO: 22970 - DNA, 21 bp, Homo sapiens
tactttcaagygaactgcaaa

SEQ ID NO: 22971 - DNA, 21 bp, Homo sapiens
gctggaatccmctgggcctcc

SEQ ID NO: 22972 - DNA, 21 bp, Homo sapiens
ttaatgtcacygttggatccc

SEQ ID NO: 22973 - DNA, 21 bp, Homo sapiens
atttgtttttmtgagtttgac

SEQ ID NO: 22974 - DNA, 21 bp, Homo sapiens
cccggaagcaygtgtctgtta

SEQ ID NO: 22975 - DNA, 21 bp, Homo sapiens
atagttgcccygagccggcaa

SEQ ID NO: 22976 - DNA, 21 bp, Homo sapiens
tatggcatgakcatggggaaa

SEQ ID NO: 22977 - DNA, 21 bp, Homo sapiens
gagtgccaggktggactgtct

SEQ ID NO: 22978 - DNA, 21 bp, Homo sapiens
gagcaacaggmgttagggagc

SEQ ID NO: 22979 - DNA, 21 bp, Homo sapiens
tggaaggtttyctttcattcc

SEQ ID NO: 22980 - DNA, 21 bp, Homo sapiens
tcaagcacttmctatgtgctg

SEQ ID NO: 22981 - DNA, 21 bp, Homo sapiens
tgtgctgctaycacagaatac

SEQ ID NO: 22982 - DNA, 21 bp, Homo sapiens
ctccgtttccrtctgtttcat

SEQ ID NO: 22983 - DNA, 21 bp, Homo sapiens
catggacattmcagggatgcc

SEQ ID NO: 22984 - DNA, 21 bp, Homo sapiens
agtcctgactrtgaggtcatg

SEQ ID NO: 22985 - DNA, 21 bp, Homo sapiens
ccgtgcatagktctctctgat

SEQ ID NO: 22986 - DNA, 21 bp, Homo sapiens
tctctctctcycccgcaggat

SEQ ID NO: 22987 - DNA, 21 bp, Homo sapiens
gccagggcacrggattgaaga

SEQ ID NO: 22988 - DNA, 21 bp, Homo sapiens
cccagttctgrtaagggcctc

SEQ ID NO: 22989 - DNA, 21 bp, Homo sapiens
tcttcatcctktaaatttggg

SEQ ID NO: 22990 - DNA, 21 bp, Homo sapiens
acatcacctcyctatgttgag

SEQ ID NO: 22991 - DNA, 21 bp, Homo sapiens
gggtcatgacrtggattatct

SEQ ID NO: 22992 - DNA, 21 bp, Homo sapiens
gattttacacratcactttgg

SEQ ID NO: 22993 - DNA, 21 bp, Homo sapiens
tcctccgggayagaccacacc

SEQ ID NO: 22994 - DNA, 21 bp, Homo sapiens
cccctgcaccycaaggtgatt

SEQ ID NO: 22995 - DNA, 21 bp, Homo sapiens
ctccaatactyggctaggaaa

SEQ ID NO: 22996 - DNA, 21 bp, Homo sapiens
ctgatctgatrtaaatccgtc

SEQ ID NO: 22997 - DNA, 21 bp, Homo sapiens
ataataccttycacctgaaag

SEQ ID NO: 22998 - DNA, 21 bp, Homo sapiens
cgaaggagggratggctcgtg

SEQ ID NO: 22999 - DNA, 21 bp, Homo sapiens
cttcttccgcrtaaaatctcc

SEQ ID NO: 23000 - DNA, 21 bp, Homo sapiens
tggcactgtcrttgagggctg

SEQ ID NO: 23001 - DNA, 21 bp, Homo sapiens
agggagaaatkgcaggattcc

SEQ ID NO: 23002 - DNA, 21 bp, Homo sapiens
tgaacgcctgyccatccttta

SEQ ID NO: 23003 - DNA, 21 bp, Homo sapiens
ttagcctagcrtgcaccgtat

SEQ ID NO: 23004 - DNA, 21 bp, Homo sapiens
tatgtggcaayagaaaaacac

SEQ ID NO: 23005 - DNA, 21 bp, Homo sapiens
aagcacctggkgggtaactag

SEQ ID NO: 23006 - DNA, 21 bp, Homo sapiens
gcaaagaaacrgggggcagga

SEQ ID NO: 23007 - DNA, 21 bp, Homo sapiens
tcttcttttcyactcttccgt

SEQ ID NO: 23008 - DNA, 21 bp, Homo sapiens
gcagctcaaamatccaggcac

SEQ ID NO: 23009 - DNA, 21 bp, Homo sapiens
aattctccttmgcggtttggg

SEQ ID NO: 23010 - DNA, 21 bp, Homo sapiens
tggggtgcctrgggggactaa

SEQ ID NO: 23011 - DNA, 21 bp, Homo sapiens
ctggtgaactyagtgaccagg

SEQ ID NO: 23012 - DNA, 21 bp, Homo sapiens
aagtcaaagayggggccattt

SEQ ID NO: 23013 - DNA, 21 bp, Homo sapiens
tgctcccctcygcttctctat

SEQ ID NO: 23014 - DNA, 21 bp, Homo sapiens
cctgcatccaytccaaggatg

SEQ ID NO: 23015 - DNA, 21 bp, Homo sapiens
tgagatgtttracaatgtaga

SEQ ID NO: 23016 - DNA, 21 bp, Homo sapiens
tgatagcgtcygcctgtaatc

SEQ ID NO: 23017 - DNA, 21 bp, Homo sapiens
tcacagtttcyaaaaaagcct

SEQ ID NO: 23018 - DNA, 21 bp, Homo sapiens
agccatgtgcygcacttcagt

SEQ ID NO: 23019 - DNA, 21 bp, Homo sapiens
atttgaaacaygaaataattt

SEQ ID NO: 23020 - DNA, 21 bp, Homo sapiens
gcactgtaaaragcttttatt

SEQ ID NO: 23021 - DNA, 21 bp, Homo sapiens
tgctttggggkttgattcagc

SEQ ID NO: 23022 - DNA, 21 bp, Homo sapiens
tcgctcagcaygggaagtgca

SEQ ID NO: 23023 - DNA, 21 bp, Homo sapiens
tccaggagcamgagctcaccc

SEQ ID NO: 23024 - DNA, 21 bp, Homo sapiens
cattgctgctyccttctcacc

SEQ ID NO: 23025 - DNA, 21 bp, Homo sapiens
tgacgccatgygtgtgcagcc

SEQ ID NO: 23026 - DNA, 21 bp, Homo sapiens
ttagagcagtyttaggttcat

SEQ ID NO: 23027 - DNA, 21 bp, Homo sapiens
ggtgagaaagrtaaacaccct

SEQ ID NO: 23028 - DNA, 21 bp, Homo sapiens
acaccctacamcctcttgctc

SEQ ID NO: 23029 - DNA, 21 bp, Homo sapiens
accacccctcrtttcttcttg

SEQ ID NO: 23030 - DNA, 21 bp, Homo sapiens
cgtcgtaggcktggggaggag

SEQ ID NO: 23031 - DNA, 21 bp, Homo sapiens
atgctccaaamctcagcatca

SEQ ID NO: 23032 - DNA, 21 bp, Homo sapiens
ggagcctgagygctgaggacc

SEQ ID NO: 23033 - DNA, 21 bp, Homo sapiens
atttgtaaatmattatgcccc

SEQ ID NO: 23034 - DNA, 21 bp, Homo sapiens
tgctggaggartgagtgtcag

SEQ ID NO: 23035 - DNA, 21 bp, Homo sapiens
gaatttacccrtacacaccca

SEQ ID NO: 23036 - DNA, 21 bp, Homo sapiens
tttcataggcygtaaagctat

SEQ ID NO: 23037 - DNA, 21 bp, Homo sapiens
acacctcacaytacgtgaccc

SEQ ID NO: 23038 - DNA, 21 bp, Homo sapiens
ttctctacacrtgcattgttc

SEQ ID NO: 23039 - DNA, 21 bp, Homo sapiens
ggcatcgaaaycaggcaaatg

SEQ ID NO: 23040 - DNA, 21 bp, Homo sapiens
acataaactaygtaactgagt

SEQ ID NO: 23041 - DNA, 21 bp, Homo sapiens
tcattcaaccmtcttctccca

SEQ ID NO: 23042 - DNA, 21 bp, Homo sapiens
ttacaccagtrtcaatggcca

SEQ ID NO: 23043 - DNA, 21 bp, Homo sapiens
aatatctacayggctaatcaa

SEQ ID NO: 23044 - DNA, 21 bp, Homo sapiens
tgaactttacraataatatca

SEQ ID NO: 23045 - DNA, 21 bp, Homo sapiens
ggcaattcttyagagtctttg

SEQ ID NO: 23046 - DNA, 21 bp, Homo sapiens
aggaggtaagmcttctgtgca

SEQ ID NO: 23047 - DNA, 21 bp, Homo sapiens
atgagtttccraatatggatg

SEQ ID NO: 23048 - DNA, 21 bp, Homo sapiens
tgtagtgtgcraagacagatg

SEQ ID NO: 23049 - DNA, 21 bp, Homo sapiens
ctctgcttgcrgttgcagact

SEQ ID NO: 23050 - DNA, 21 bp, Homo sapiens
tcagtttttcyaagataatga

SEQ ID NO: 23051 - DNA, 21 bp, Homo sapiens
attcgtttcaygcatattacg

SEQ ID NO: 23052 - DNA, 21 bp, Homo sapiens
caccaggactrtaatgcaggt

SEQ ID NO: 23053 - DNA, 21 bp, Homo sapiens
cttaccagctrggagcatgct

SEQ ID NO: 23054 - DNA, 21 bp, Homo sapiens
caatctgtttmcccccatttt

SEQ ID NO: 23055 - DNA, 21 bp, Homo sapiens
tacttccttcyggccaatcca

SEQ ID NO: 23056 - DNA, 21 bp, Homo sapiens
taagattcagygtgtttgcca

SEQ ID NO: 23057 - DNA, 21 bp, Homo sapiens
atctcagcctytcccattcct

SEQ ID NO: 23058 - DNA, 21 bp, Homo sapiens
ttctctcctgrcacattcagc

SEQ ID NO: 23059 - DNA, 21 bp, Homo sapiens
tcaggtgcccyactccacccc

SEQ ID NO: 23060 - DNA, 21 bp, Homo sapiens
gtgtaagtcaygacagggccc

SEQ ID NO: 23061 - DNA, 21 bp, Homo sapiens
ccccacaagarcccaccgtaa

SEQ ID NO: 23062 - DNA, 21 bp, Homo sapiens
atctggtaacyctggaagtgt

SEQ ID NO: 23063 - DNA, 21 bp, Homo sapiens
ctttaataagytgtctttagc

SEQ ID NO: 23064 - DNA, 21 bp, Homo sapiens
attagatgatrcacctggcac

SEQ ID NO: 23065 - DNA, 21 bp, Homo sapiens
agctgaggttrcaagatatag

SEQ ID NO: 23066 - DNA, 21 bp, Homo sapiens
taatccccagmgagacaaaag

SEQ ID NO: 23067 - DNA, 21 bp, Homo sapiens
tggtgcatgcyacattcactg

SEQ ID NO: 23068 - DNA, 21 bp, Homo sapiens
acatcaggacrcacgtgatgc

SEQ ID NO: 23069 - DNA, 21 bp, Homo sapiens
tttcctgataygcagagaatg

SEQ ID NO: 23070 - DNA, 21 bp, Homo sapiens
aagcttgtcartgagtccagc

SEQ ID NO: 23071 - DNA, 21 bp, Homo sapiens
gagacatttaygtttcagtaa

SEQ ID NO: 23072 - DNA, 21 bp, Homo sapiens
ttgtccagccrtcttgaaaag

SEQ ID NO: 23073 - DNA, 21 bp, Homo sapiens
agcacctagcrgttctgaatg

SEQ ID NO: 23074 - DNA, 21 bp, Homo sapiens
gtactctcagrgccaaggctc

SEQ ID NO: 23075 - DNA, 21 bp, Homo sapiens
acagtgctcaygtcacaatga

SEQ ID NO: 23076 - DNA, 21 bp, Homo sapiens
ctctgactgtrcaggtcaagt

SEQ ID NO: 23077 - DNA, 21 bp, Homo sapiens
caaaatcctgrcaagccttat

SEQ ID NO: 23078 - DNA, 21 bp, Homo sapiens
agatcaatgcygggatctgga

SEQ ID NO: 23079 - DNA, 21 bp, Homo sapiens
ctgacacatgytttaggcaaa

SEQ ID NO: 23080 - DNA, 21 bp, Homo sapiens
agtagagatgraaacttgatg

SEQ ID NO: 23081 - DNA, 21 bp, Homo sapiens
acttggaaaartcacccaacc

SEQ ID NO: 23082 - DNA, 21 bp, Homo sapiens
aagaacctgargttagaagtg

SEQ ID NO: 23083 - DNA, 21 bp, Homo sapiens
ggtagagaacracaaatggaa

SEQ ID NO: 23084 - DNA, 21 bp, Homo sapiens
aaggaggggargattagaaca

SEQ ID NO: 23085 - DNA, 21 bp, Homo sapiens
aggaaaagcgrgcgttcaaaa

SEQ ID NO: 23086 - DNA, 21 bp, Homo sapiens
attatgcacayattgttcatg

SEQ ID NO: 23087 - DNA, 21 bp, Homo sapiens
cagggcttctkagactccctg

SEQ ID NO: 23088 - DNA, 21 bp, Homo sapiens
cagtcaaccamaacttccatg

SEQ ID NO: 23089 - DNA, 21 bp, Homo sapiens
atggaagccamgtgttgagta

SEQ ID NO: 23090 - DNA, 21 bp, Homo sapiens
ctggaactatyttgcaagtat

SEQ ID NO: 23091 - DNA, 21 bp, Homo sapiens
tattttgttcrttactgtatt

SEQ ID NO: 23092 - DNA, 21 bp, Homo sapiens
gccactgcccragttcaagga

SEQ ID NO: 23093 - DNA, 21 bp, Homo sapiens
tggcccctttracaataatag

SEQ ID NO: 23094 - DNA, 21 bp, Homo sapiens
tcagtccctcrtaagattggt

SEQ ID NO: 23095 - DNA, 21 bp, Homo sapiens
tcactctagakccttggtgaa

SEQ ID NO: 23096 - DNA, 21 bp, Homo sapiens
ctctgaaaccrtacagccaag

SEQ ID NO: 23097 - DNA, 21 bp, Homo sapiens
atgtctcgcayaaacgccgga

SEQ ID NO: 23098 - DNA, 21 bp, Homo sapiens
aaatgaagaargtcagctgag

SEQ ID NO: 23099 - DNA, 21 bp, Homo sapiens
agtcagatgamtgttcaggga

SEQ ID NO: 23100 - DNA, 21 bp, Homo sapiens
gatggtactckgtatttccag

SEQ ID NO: 23101 - DNA, 21 bp, Homo sapiens
agtggcaagayccccagcact

SEQ ID NO: 23102 - DNA, 21 bp, Homo sapiens
ctgggggctgrggaattgtat

SEQ ID NO: 23103 - DNA, 21 bp, Homo sapiens
tctgtctttcygatgagctcc

SEQ ID NO: 23104 - DNA, 21 bp, Homo sapiens
gccaatagggyccttgttgag

SEQ ID NO: 23105 - DNA, 21 bp, Homo sapiens
ggggactaccmatagtgtcat

SEQ ID NO: 23106 - DNA, 21 bp, Homo sapiens
cttctcaattygcatgtgagc

SEQ ID NO: 23107 - DNA, 21 bp, Homo sapiens
acccccgcacractccctgtc

SEQ ID NO: 23108 - DNA, 21 bp, Homo sapiens
tatgatagagragaagaaagg

SEQ ID NO: 23109 - DNA, 21 bp, Homo sapiens
atcgtactacyttttcatagt

SEQ ID NO: 23110 - DNA, 21 bp, Homo sapiens
tcccttcccartcttacttcc

SEQ ID NO: 23111 - DNA, 21 bp, Homo sapiens
catggaggaamaattgaggtt

SEQ ID NO: 23112 - DNA, 21 bp, Homo sapiens
ctttctggatrttttgacctc

SEQ ID NO: 23113 - DNA, 21 bp, Homo sapiens
tgattcccccrgtagaagtaa

SEQ ID NO: 23114 - DNA, 21 bp, Homo sapiens
gcttcttatgkctgacaatct

SEQ ID NO: 23115 - DNA, 21 bp, Homo sapiens
agggcgtataycatgaaggga

SEQ ID NO: 23116 - DNA, 21 bp, Homo sapiens
aatagtattamtttctctaca

SEQ ID NO: 23117 - DNA, 21 bp, Homo sapiens
taaaaatgtgyatgagaggcc

SEQ ID NO: 23118 - DNA, 21 bp, Homo sapiens
atgagtacaaytgggtgcctt

SEQ ID NO: 23119 - DNA, 21 bp, Homo sapiens
cccttaaaagrgatgcacgtc

SEQ ID NO: 23120 - DNA, 21 bp, Homo sapiens
ttacataaatrccaatgtatt

SEQ ID NO: 23121 - DNA, 21 bp, Homo sapiens
gagaatcaacktcagtctatt

SEQ ID NO: 23122 - DNA, 21 bp, Homo sapiens
cttctgtccayctacagatgt

SEQ ID NO: 23123 - DNA, 21 bp, Homo sapiens
tcagcagtaartgaagctaaa

SEQ ID NO: 23124 - DNA, 21 bp, Homo sapiens
gggggcagggktcacaagctg

SEQ ID NO: 23125 - DNA, 21 bp, Homo sapiens
ttatttgactrtaggctcctg

SEQ ID NO: 23126 - DNA, 21 bp, Homo sapiens
ttcataaagartattattggc

SEQ ID NO: 23127 - DNA, 21 bp, Homo sapiens
acaacagaccrtgtattaaca

SEQ ID NO: 23128 - DNA, 21 bp, Homo sapiens
tctaataaaakagtaaagcac

SEQ ID NO: 23129 - DNA, 21 bp, Homo sapiens
tgcctagatcrctgatgaagt

SEQ ID NO: 23130 - DNA, 21 bp, Homo sapiens
cagtaacattkctgagggaca

SEQ ID NO: 23131 - DNA, 21 bp, Homo sapiens
caggtactccyattttttatt

SEQ ID NO: 23132 - DNA, 21 bp, Homo sapiens
ggtgtcagccrggaatgtttc

SEQ ID NO: 23133 - DNA, 21 bp, Homo sapiens
cacatctttamcaaagtaaaa

SEQ ID NO: 23134 - DNA, 21 bp, Homo sapiens
ttatattaggytagaagtttg

SEQ ID NO: 23135 - DNA, 21 bp, Homo sapiens
gcacctctcgrgccaagccct

SEQ ID NO: 23136 - DNA, 21 bp, Homo sapiens
gaacatagccygcctcatcca

SEQ ID NO: 23137 - DNA, 21 bp, Homo sapiens
caggcagtgtrggctggcatc

SEQ ID NO: 23138 - DNA, 21 bp, Homo sapiens
tgggatgattyggagggatgc

SEQ ID NO: 23139 - DNA, 21 bp, Homo sapiens
atagatcctcyaaattagttt

SEQ ID NO: 23140 - DNA, 21 bp, Homo sapiens
cgatggagcaygtgcgtgagc

SEQ ID NO: 23141 - DNA, 21 bp, Homo sapiens
tcaggcataaragtaccaaga

SEQ ID NO: 23142 - DNA, 21 bp, Homo sapiens
tcataccaacmgtccttgaaa

SEQ ID NO: 23143 - DNA, 21 bp, Homo sapiens
cacccttacayccgcagtgga

SEQ ID NO: 23144 - DNA, 21 bp, Homo sapiens
ccattcccaarcccatattct

SEQ ID NO: 23145 - DNA, 21 bp, Homo sapiens
acacaccacayagcacacaca

SEQ ID NO: 23146 - DNA, 21 bp, Homo sapiens
gttttcagcayagccgtcaga

SEQ ID NO: 23147 - DNA, 21 bp, Homo sapiens
tagggtaatcyggagggatgg

SEQ ID NO: 23148 - DNA, 21 bp, Homo sapiens
actattcctgygatcaagctg

SEQ ID NO: 23149 - DNA, 21 bp, Homo sapiens
cttatgcagtytctgtctctt

SEQ ID NO: 23150 - DNA, 21 bp, Homo sapiens
aggttgggaayggtgcccagt

SEQ ID NO: 23151 - DNA, 21 bp, Homo sapiens
cagtttcctgkattcctctcc

SEQ ID NO: 23152 - DNA, 21 bp, Homo sapiens
tccactggctyatagtcttaa

SEQ ID NO: 23153 - DNA, 21 bp, Homo sapiens
gattccagacytctaccgcta

SEQ ID NO: 23154 - DNA, 21 bp, Homo sapiens
gtgggcaatgrtgaaaggtgg

SEQ ID NO: 23155 - DNA, 21 bp, Homo sapiens
ttaccccaggyttggcatgtg

SEQ ID NO: 23156 - DNA, 21 bp, Homo sapiens
aaagggaatgyctctgcatct

SEQ ID NO: 23157 - DNA, 21 bp, Homo sapiens
cactacatcayttattgtcat

SEQ ID NO: 23158 - DNA, 21 bp, Homo sapiens
gttaatgacckagtgtcaagt

SEQ ID NO: 23159 - DNA, 21 bp, Homo sapiens
ttaactcactragggtctatg

SEQ ID NO: 23160 - DNA, 21 bp, Homo sapiens
cagagaaataygagggtattg

SEQ ID NO: 23161 - DNA, 21 bp, Homo sapiens
agaactatacmgaagtctgcc

SEQ ID NO: 23162 - DNA, 21 bp, Homo sapiens
gaggacaaagrggggtggtat

SEQ ID NO: 23163 - DNA, 21 bp, Homo sapiens
ttggaccactrtcacctaaga

SEQ ID NO: 23164 - DNA, 21 bp, Homo sapiens
gttctacatgmatcttattca

SEQ ID NO: 23165 - DNA, 21 bp, Homo sapiens
attcacattartaggagctga

SEQ ID NO: 23166 - DNA, 21 bp, Homo sapiens
tggatacatgmacaggtatta

SEQ ID NO: 23167 - DNA, 21 bp, Homo sapiens
aaaatgactgygtagtagtcc

SEQ ID NO: 23168 - DNA, 21 bp, Homo sapiens
cagcatctctyatctgtctga

SEQ ID NO: 23169 - DNA, 21 bp, Homo sapiens
ggagaagtcayttgcgagaaa

SEQ ID NO: 23170 - DNA, 21 bp, Homo sapiens
ttgtcttcctrgaaaataagt

SEQ ID NO: 23171 - DNA, 21 bp, Homo sapiens
gattttacaaygcattgttat

SEQ ID NO: 23172 - DNA, 21 bp, Homo sapiens
tggtaatctckatgagaaaag

SEQ ID NO: 23173 - DNA, 21 bp, Homo sapiens
aaattaattckggggtgtaat

SEQ ID NO: 23174 - DNA, 21 bp, Homo sapiens
aatagagatayattaaatgag

SEQ ID NO: 23175 - DNA, 21 bp, Homo sapiens
tatgtctatgygtttgtaatt

SEQ ID NO: 23176 - DNA, 21 bp, Homo sapiens
tgtttctcatygaaagacttc

SEQ ID NO: 23177 - DNA, 21 bp, Homo sapiens
aaacatttccrtggggtaaca

SEQ ID NO: 23178 - DNA, 21 bp, Homo sapiens
tttctaccttkggattttatg

SEQ ID NO: 23179 - DNA, 21 bp, Homo sapiens
gaacttttctragcacacaag

SEQ ID NO: 23180 - DNA, 21 bp, Homo sapiens
cattattgaaytgaaacacat

SEQ ID NO: 23181 - DNA, 21 bp, Homo sapiens
gctaggaaggraacatcattt

SEQ ID NO: 23182 - DNA, 21 bp, Homo sapiens
ctttgagttayattgacactc

SEQ ID NO: 23183 - DNA, 21 bp, Homo sapiens
ttgaacatctygggagaattt

SEQ ID NO: 23184 - DNA, 21 bp, Homo sapiens
tattgcaattrcaaaaagaat

SEQ ID NO: 23185 - DNA, 21 bp, Homo sapiens
gagtttaaaargattgtgaac

SEQ ID NO: 23186 - DNA, 21 bp, Homo sapiens
tggttaaaggmagtgtgtgtg

SEQ ID NO: 23187 - DNA, 21 bp, Homo sapiens
aaaaagagggycagagagtct

SEQ ID NO: 23188 - DNA, 21 bp, Homo sapiens
ttattttagtmatttgggata

SEQ ID NO: 23189 - DNA, 21 bp, Homo sapiens
gcaagaagatkatatacttct

SEQ ID NO: 23190 - DNA, 21 bp, Homo sapiens
aaagtttgatytcaaaaaaat

SEQ ID NO: 23191 - DNA, 21 bp, Homo sapiens
ggaatgaaatmttgtcatttt

SEQ ID NO: 23192 - DNA, 21 bp, Homo sapiens
cattttactcmtatgccatat

SEQ ID NO: 23193 - DNA, 21 bp, Homo sapiens
ttttatttcarttgagtcttg

SEQ ID NO: 23194 - DNA, 21 bp, Homo sapiens
ccaaaagtcaktttggggtat

SEQ ID NO: 23195 - DNA, 21 bp, Homo sapiens
tcagctatgtrtggttgttca

SEQ ID NO: 23196 - DNA, 21 bp, Homo sapiens
gtgagaacaayatgaaaccct

SEQ ID NO: 23197 - DNA, 21 bp, Homo sapiens
tttctgttgayattttgcatc

SEQ ID NO: 23198 - DNA, 21 bp, Homo sapiens
ctcctaagttycattggccca

SEQ ID NO: 23199 - DNA, 21 bp, Homo sapiens
agattagtttycagttcactt

SEQ ID NO: 23200 - DNA, 21 bp, Homo sapiens
ccttttctgcmttttctggtt

SEQ ID NO: 23201 - DNA, 21 bp, Homo sapiens
gatggtatagygttactagca

SEQ ID NO: 23202 - DNA, 21 bp, Homo sapiens
acatcacattyactgacgtgt

SEQ ID NO: 23203 - DNA, 21 bp, Homo sapiens
tgggatgcccraatagcacat

SEQ ID NO: 23204 - DNA, 21 bp, Homo sapiens
caaatgtcccmagatttaatt

SEQ ID NO: 23205 - DNA, 21 bp, Homo sapiens
taccctccccygtaaagcagt

SEQ ID NO: 23206 - DNA, 21 bp, Homo sapiens
accaggccacrtactggttgc

SEQ ID NO: 23207 - DNA, 21 bp, Homo sapiens
gtacatcactrcaataatgtt

SEQ ID NO: 23208 - DNA, 21 bp, Homo sapiens
atgcctaatcytgcccccatg

SEQ ID NO: 23209 - DNA, 21 bp, Homo sapiens
atttgatgacrgctacagatg

SEQ ID NO: 23210 - DNA, 21 bp, Homo sapiens
acaggcagtgyctagaagcct

SEQ ID NO: 23211 - DNA, 21 bp, Homo sapiens
gggacatgccyaaaatgaggt

SEQ ID NO: 23212 - DNA, 21 bp, Homo sapiens
taattgtattkggtcttatgt

SEQ ID NO: 23213 - DNA, 21 bp, Homo sapiens
gatttaaaatrtagtctcttg

SEQ ID NO: 23214 - DNA, 21 bp, Homo sapiens
ctacagatctrtatgcatcaa

SEQ ID NO: 23215 - DNA, 21 bp, Homo sapiens
tttgaatataytattttatct

SEQ ID NO: 23216 - DNA, 21 bp, Homo sapiens
tcttcatcaakaccttgtgaa

SEQ ID NO: 23217 - DNA, 21 bp, Homo sapiens
cacttgtaacrgcaactcctt

SEQ ID NO: 23218 - DNA, 21 bp, Homo sapiens
taaatcttttrtatagaatta

SEQ ID NO: 23219 - DNA, 21 bp, Homo sapiens
attataagatyggctatagtc

SEQ ID NO: 23220 - DNA, 21 bp, Homo sapiens
aatccagtgaraagcattagt

SEQ ID NO: 23221 - DNA, 21 bp, Homo sapiens
tgtaattccakaatattttca

SEQ ID NO: 23222 - DNA, 21 bp, Homo sapiens
ccacagaaatrccagggaagg

SEQ ID NO: 23223 - DNA, 21 bp, Homo sapiens
gcctgagagartctacctgtg

SEQ ID NO: 23224 - DNA, 21 bp, Homo sapiens
caatcacaagrgctttttaaa

SEQ ID NO: 23225 - DNA, 21 bp, Homo sapiens
tgaagaaagartgtattcctt

SEQ ID NO: 23226 - DNA, 21 bp, Homo sapiens
ttgtgcttatytacatgtttt

SEQ ID NO: 23227 - DNA, 21 bp, Homo sapiens
gaaatatttamttaaggacat

SEQ ID NO: 23228 - DNA, 21 bp, Homo sapiens
ttaataagaargagaacaaag

SEQ ID NO: 23229 - DNA, 21 bp, Homo sapiens
actgttgaatycaaatgagat

SEQ ID NO: 23230 - DNA, 21 bp, Homo sapiens
taccatgatayggcagggaga

SEQ ID NO: 23231 - DNA, 21 bp, Homo sapiens
ctatgtcccckagtcaggcac

SEQ ID NO: 23232 - DNA, 21 bp, Homo sapiens
caagcaggtgytggtagtcat

SEQ ID NO: 23233 - DNA, 21 bp, Homo sapiens
ctactaccacytggcctaaga

SEQ ID NO: 23234 - DNA, 21 bp, Homo sapiens
atctaactcaycctactcagt

SEQ ID NO: 23235 - DNA, 21 bp, Homo sapiens
tcagagaaagrtgacactttt

SEQ ID NO: 23236 - DNA, 21 bp, Homo sapiens
agtggtttatygagggagtat

SEQ ID NO: 23237 - DNA, 21 bp, Homo sapiens
aacagcaatcyttgtcaaagc

SEQ ID NO: 23238 - DNA, 21 bp, Homo sapiens
cacatgttgtrcttttgcctc

SEQ ID NO: 23239 - DNA, 21 bp, Homo sapiens
gctgcacttgrggtttctctg

SEQ ID NO: 23240 - DNA, 21 bp, Homo sapiens
tagactttaargagaacacgg

SEQ ID NO: 23241 - DNA, 21 bp, Homo sapiens
gttacctagtyattaacatgg

SEQ ID NO: 23242 - DNA, 21 bp, Homo sapiens
ttgctgagtgyctagtacagg

SEQ ID NO: 23243 - DNA, 21 bp, Homo sapiens
ataaagttacytctttgtagt

SEQ ID NO: 23244 - DNA, 21 bp, Homo sapiens
gagtggtcctycaggactcct

SEQ ID NO: 23245 - DNA, 21 bp, Homo sapiens
ttattctgtcycacaatttcc

SEQ ID NO: 23246 - DNA, 21 bp, Homo sapiens
taagactacakatttatctga

SEQ ID NO: 23247 - DNA, 21 bp, Homo sapiens
cagttcaactytctctcattt

SEQ ID NO: 23248 - DNA, 21 bp, Homo sapiens
aaatagtcaarccatagcaac

SEQ ID NO: 23249 - DNA, 21 bp, Homo sapiens
gagattagcartggttttctg

SEQ ID NO: 23250 - DNA, 21 bp, Homo sapiens
ttccccaactrctctttctta

SEQ ID NO: 23251 - DNA, 21 bp, Homo sapiens
accttatgacmatctctggta

SEQ ID NO: 23252 - DNA, 21 bp, Homo sapiens
gtttatttacrggaaacctga

SEQ ID NO: 23253 - DNA, 21 bp, Homo sapiens
cccaaatgtcrctattcatgt

SEQ ID NO: 23254 - DNA, 21 bp, Homo sapiens
cacctctcccyataccctgaa

SEQ ID NO: 23255 - DNA, 21 bp, Homo sapiens
cacatagtgtygataatacag

SEQ ID NO: 23256 - DNA, 21 bp, Homo sapiens
attagttagtygcttctaata

SEQ ID NO: 23257 - DNA, 21 bp, Homo sapiens
aatgtgcctgmcacttcattc

SEQ ID NO: 23258 - DNA, 21 bp, Homo sapiens
ggcaataacarggttggctag

SEQ ID NO: 23259 - DNA, 21 bp, Homo sapiens
aggtttagtgrggaagtatgt

SEQ ID NO: 23260 - DNA, 21 bp, Homo sapiens
aaagtataggyaaaaaaaaat

SEQ ID NO: 23261 - DNA, 21 bp, Homo sapiens
atagttatggyattatgcagg

SEQ ID NO: 23262 - DNA, 21 bp, Homo sapiens
aagatggacgrtgagtgaaga

SEQ ID NO: 23263 - DNA, 21 bp, Homo sapiens
ctcagaaactrcccttacttc

SEQ ID NO: 23264 - DNA, 21 bp, Homo sapiens
agaactaagtrgacaaagcga

SEQ ID NO: 23265 - DNA, 21 bp, Homo sapiens
aaattaggttmggaagttttg

SEQ ID NO: 23266 - DNA, 21 bp, Homo sapiens
tccagggtagratcaatgcct

SEQ ID NO: 23267 - DNA, 21 bp, Homo sapiens
atcttagtgcrtgaatatacc

SEQ ID NO: 23268 - DNA, 21 bp, Homo sapiens
gaaacttctaytcagatctgc

SEQ ID NO: 23269 - DNA, 21 bp, Homo sapiens
attaaagatgrcttagattga

SEQ ID NO: 23270 - DNA, 21 bp, Homo sapiens
ttgtagatatrgaccattgtg

SEQ ID NO: 23271 - DNA, 21 bp, Homo sapiens
atgctgttgtraactttcatg

SEQ ID NO: 23272 - DNA, 21 bp, Homo sapiens
actattctctraatttgaagt

SEQ ID NO: 23273 - DNA, 21 bp, Homo sapiens
gtattccattktctggatatg

SEQ ID NO: 23274 - DNA, 21 bp, Homo sapiens
caaggtacccrcaaaaattcc

SEQ ID NO: 23275 - DNA, 21 bp, Homo sapiens
aacagaaaagrggatggagct

SEQ ID NO: 23276 - DNA, 21 bp, Homo sapiens
ggtgtcctttygggagggtga

SEQ ID NO: 23277 - DNA, 21 bp, Homo sapiens
gaagcaggtaygtcaaatcaa

SEQ ID NO: 23278 - DNA, 21 bp, Homo sapiens
gcgatgagggraagggggaag

SEQ ID NO: 23279 - DNA, 21 bp, Homo sapiens
acataggttayagaaagtagg

SEQ ID NO: 23280 - DNA, 21 bp, Homo sapiens
aattgttgtgragaagactga

SEQ ID NO: 23281 - DNA, 21 bp, Homo sapiens
tatatatcttmaccttcataa

SEQ ID NO: 23282 - DNA, 21 bp, Homo sapiens
tccataccgartacaagtggg

SEQ ID NO: 23283 - DNA, 21 bp, Homo sapiens
gtcagggccaygcattctacc

SEQ ID NO: 23284 - DNA, 21 bp, Homo sapiens
tgtgtgtagayaaatcattgc

SEQ ID NO: 23285 - DNA, 21 bp, Homo sapiens
tgtaaagttgygtgctttagc

SEQ ID NO: 23286 - DNA, 21 bp, Homo sapiens
aaaataagcayggtgattggc

SEQ ID NO: 23287 - DNA, 21 bp, Homo sapiens
acatagctccygaaactattc

SEQ ID NO: 23288 - DNA, 21 bp, Homo sapiens
acaacctccayctcaaattct

SEQ ID NO: 23289 - DNA, 21 bp, Homo sapiens
taagggagcarggcaatgtta

SEQ ID NO: 23290 - DNA, 21 bp, Homo sapiens
aaagacagggmaagaatcaga

SEQ ID NO: 23291 - DNA, 21 bp, Homo sapiens
catcaacagamtcttccatac

SEQ ID NO: 23292 - DNA, 21 bp, Homo sapiens
cttttcttgaygtctattttc

SEQ ID NO: 23293 - DNA, 21 bp, Homo sapiens
tttattatctygagaaaagta

SEQ ID NO: 23294 - DNA, 21 bp, Homo sapiens
ctttggtttayagcccatgat

SEQ ID NO: 23295 - DNA, 21 bp, Homo sapiens
gactagatgaytgaatttcta

SEQ ID NO: 23296 - DNA, 21 bp, Homo sapiens
atctttggatyttctaaagca

SEQ ID NO: 23297 - DNA, 21 bp, Homo sapiens
tagactaaagrtaaatatcaa

SEQ ID NO: 23298 - DNA, 21 bp, Homo sapiens
tttcttcatayacaactggtc

SEQ ID NO: 23299 - DNA, 21 bp, Homo sapiens
tgaaggcatcrgctaacacca

SEQ ID NO: 23300 - DNA, 21 bp, Homo sapiens
tactgttggcyctccatatct

SEQ ID NO: 23301 - DNA, 21 bp, Homo sapiens
cacccctactmagggtggggg

SEQ ID NO: 23302 - DNA, 21 bp, Homo sapiens
gtgacaatcarctgatagtca

SEQ ID NO: 23303 - DNA, 21 bp, Homo sapiens
cccaaaccacmtgaaattcta

SEQ ID NO: 23304 - DNA, 21 bp, Homo sapiens
ggttactgtarggaccaaatg

SEQ ID NO: 23305 - DNA, 21 bp, Homo sapiens
tgggtccctaygtcaaaggca

SEQ ID NO: 23306 - DNA, 21 bp, Homo sapiens
ttaaataatayttttgtccca

SEQ ID NO: 23307 - DNA, 21 bp, Homo sapiens
tattggctcamagctgtagag

SEQ ID NO: 23308 - DNA, 21 bp, Homo sapiens
cagttctgtarctaggctact

SEQ ID NO: 23309 - DNA, 21 bp, Homo sapiens
taaatgctccmactctcaaag

SEQ ID NO: 23310 - DNA, 21 bp, Homo sapiens
caaaggagctrtacatagggt

SEQ ID NO: 23311 - DNA, 21 bp, Homo sapiens
gtaaattaaaygtatacaatc

SEQ ID NO: 23312 - DNA, 21 bp, Homo sapiens
attattttgargccatcagtt

SEQ ID NO: 23313 - DNA, 21 bp, Homo sapiens
acaactagctmcatttgatta

SEQ ID NO: 23314 - DNA, 21 bp, Homo sapiens
taaggtgtgcrattttctata

SEQ ID NO: 23315 - DNA, 21 bp, Homo sapiens
ttggaaagctrcagaaactgt

SEQ ID NO: 23316 - DNA, 21 bp, Homo sapiens
tctcatccctrtattacaaac

SEQ ID NO: 23317 - DNA, 21 bp, Homo sapiens
atatcaagtaycagtagcctt

SEQ ID NO: 23318 - DNA, 21 bp, Homo sapiens
caaagcaagartggactggtc

SEQ ID NO: 23319 - DNA, 21 bp, Homo sapiens
gttaaagctartcaagtcagc

SEQ ID NO: 23320 - DNA, 21 bp, Homo sapiens
taacttaaaamaaatcttctc

SEQ ID NO: 23321 - DNA, 21 bp, Homo sapiens
tacccaaaccrtatgattttt

SEQ ID NO: 23322 - DNA, 21 bp, Homo sapiens
ttacagtaatrcaatgcactg

SEQ ID NO: 23323 - DNA, 21 bp, Homo sapiens
ttttctacttktgtggagctt

SEQ ID NO: 23324 - DNA, 21 bp, Homo sapiens
cagaggatttyctttgccaga

SEQ ID NO: 23325 - DNA, 21 bp, Homo sapiens
cagtggaagtyaacgccagaa

SEQ ID NO: 23326 - DNA, 21 bp, Homo sapiens
tgaccatggcrggtgtattta

SEQ ID NO: 23327 - DNA, 21 bp, Homo sapiens
ttcctactccyacgattttgg

SEQ ID NO: 23328 - DNA, 21 bp, Homo sapiens
taatctagacrttgggaattt

SEQ ID NO: 23329 - DNA, 21 bp, Homo sapiens
caaaagatagmtagagaaggg

SEQ ID NO: 23330 - DNA, 21 bp, Homo sapiens
aatagaagagrgtttgactgg

SEQ ID NO: 23331 - DNA, 21 bp, Homo sapiens
tttctgggggraagacagaat

SEQ ID NO: 23332 - DNA, 21 bp, Homo sapiens
ggatggcaagygaattttgct

SEQ ID NO: 23333 - DNA, 21 bp, Homo sapiens
taacaacatcrgtgtactttc

SEQ ID NO: 23334 - DNA, 21 bp, Homo sapiens
tggaccccaaytccccagcac

SEQ ID NO: 23335 - DNA, 21 bp, Homo sapiens
agtagcttgcrtggtagcagt

SEQ ID NO: 23336 - DNA, 21 bp, Homo sapiens
agaaaataacmaatgttttaa

SEQ ID NO: 23337 - DNA, 21 bp, Homo sapiens
aacactggccrccacagacca

SEQ ID NO: 23338 - DNA, 21 bp, Homo sapiens
ttattgaaatraacatcctaa

SEQ ID NO: 23339 - DNA, 21 bp, Homo sapiens
ttctatcaaayaggagctata

SEQ ID NO: 23340 - DNA, 21 bp, Homo sapiens
tggtatctctratttgtggag

SEQ ID NO: 23341 - DNA, 21 bp, Homo sapiens
caagtggtagygttaagtgag

SEQ ID NO: 23342 - DNA, 21 bp, Homo sapiens
cccaccactcrcccgtcatag

SEQ ID NO: 23343 - DNA, 21 bp, Homo sapiens
aataaggcttyggctgcattc

SEQ ID NO: 23344 - DNA, 21 bp, Homo sapiens
tggactagaaygagtctgtgg

SEQ ID NO: 23345 - DNA, 21 bp, Homo sapiens
tatgagactaytgggtcagtt

SEQ ID NO: 23346 - DNA, 21 bp, Homo sapiens
tcatctgttayagtttgacaa

SEQ ID NO: 23347 - DNA, 21 bp, Homo sapiens
ttttcatgatycaatgaaggg

SEQ ID NO: 23348 - DNA, 21 bp, Homo sapiens
ttgctgaaggycccagatgtt

SEQ ID NO: 23349 - DNA, 21 bp, Homo sapiens
atgtaatcctkttaggtttgg

SEQ ID NO: 23350 - DNA, 21 bp, Homo sapiens
ttctttctgcrtaaggctcca

SEQ ID NO: 23351 - DNA, 21 bp, Homo sapiens
aataggtttaratgttctact

SEQ ID NO: 23352 - DNA, 21 bp, Homo sapiens
ttttagttaaytggggatttt

SEQ ID NO: 23353 - DNA, 21 bp, Homo sapiens
tccctttctcrtgactacaaa

SEQ ID NO: 23354 - DNA, 21 bp, Homo sapiens
tggagattctrtgaaataatt

SEQ ID NO: 23355 - DNA, 21 bp, Homo sapiens
gtctctttgayttgtggaacc

SEQ ID NO: 23356 - DNA, 21 bp, Homo sapiens
tacccctgttrcctgagaatg

SEQ ID NO: 23357 - DNA, 21 bp, Homo sapiens
agaaactgacyctgagcctgc

SEQ ID NO: 23358 - DNA, 21 bp, Homo sapiens
ggactacaaaygattgttcaa

SEQ ID NO: 23359 - DNA, 21 bp, Homo sapiens
actttatttgmattaaattcc

SEQ ID NO: 23360 - DNA, 21 bp, Homo sapiens
caattggctgyacacacaact

SEQ ID NO: 23361 - DNA, 21 bp, Homo sapiens
ccaaagcaggyatatccatgg

SEQ ID NO: 23362 - DNA, 21 bp, Homo sapiens
atgcaaagaakaagtgatact

SEQ ID NO: 23363 - DNA, 21 bp, Homo sapiens
tatagcctgtrattaaggatc

SEQ ID NO: 23364 - DNA, 21 bp, Homo sapiens
aggtaaagagygaagtgttaa

SEQ ID NO: 23365 - DNA, 21 bp, Homo sapiens
ctgaaggaggrttgatgaaga

SEQ ID NO: 23366 - DNA, 21 bp, Homo sapiens
agatggggagrttaatgctgg

SEQ ID NO: 23367 - DNA, 21 bp, Homo sapiens
tcacaccctcytcttctttat

SEQ ID NO: 23368 - DNA, 21 bp, Homo sapiens
aagtccccacmccccgccccc

SEQ ID NO: 23369 - DNA, 21 bp, Homo sapiens
accctttcccygaaggagggg

SEQ ID NO: 23370 - DNA, 21 bp, Homo sapiens
ccatcctaagmacaaggtaac

SEQ ID NO: 23371 - DNA, 21 bp, Homo sapiens
gttaaacacaytgtcagcagg

SEQ ID NO: 23372 - DNA, 21 bp, Homo sapiens
ttattggtttrtggaggtttg

SEQ ID NO: 23373 - DNA, 21 bp, Homo sapiens
aacattttgcmgcttccttgc

SEQ ID NO: 23374 - DNA, 21 bp, Homo sapiens
gaaggtggtamttatatatag

SEQ ID NO: 23375 - DNA, 21 bp, Homo sapiens
tatcacctcartgatctcggg

SEQ ID NO: 23376 - DNA, 21 bp, Homo sapiens
caacttctccyttctagactt

SEQ ID NO: 23377 - DNA, 21 bp, Homo sapiens
tgttactaggyggagtatggt

SEQ ID NO: 23378 - DNA, 21 bp, Homo sapiens
ggtctttcaaycaatgaatgt

SEQ ID NO: 23379 - DNA, 21 bp, Homo sapiens
tggtgatttgyatcttttctt

SEQ ID NO: 23380 - DNA, 21 bp, Homo sapiens
gggtatcttcrgcagatggcc

SEQ ID NO: 23381 - DNA, 21 bp, Homo sapiens
actgtgggcartaggggctca

SEQ ID NO: 23382 - DNA, 21 bp, Homo sapiens
tttgctgttartacttctgct

SEQ ID NO: 23383 - DNA, 21 bp, Homo sapiens
taatgggttaytgctacatac

SEQ ID NO: 23384 - DNA, 21 bp, Homo sapiens
tcttctagtarttttatcata

SEQ ID NO: 23385 - DNA, 21 bp, Homo sapiens
ttaccaaaaaygaccgtaaaa

SEQ ID NO: 23386 - DNA, 21 bp, Homo sapiens
agaaaaaaagratcaaatcag

SEQ ID NO: 23387 - DNA, 21 bp, Homo sapiens
tataaaattgrtatcgtaact

SEQ ID NO: 23388 - DNA, 21 bp, Homo sapiens
gctcatggaaygttctccaag

SEQ ID NO: 23389 - DNA, 21 bp, Homo sapiens
ttagcacacarccagacacac

SEQ ID NO: 23390 - DNA, 21 bp, Homo sapiens
tccataggtcmtttataaaaa

SEQ ID NO: 23391 - DNA, 21 bp, Homo sapiens
gaacaattacyaaaacttgga

SEQ ID NO: 23392 - DNA, 21 bp, Homo sapiens
atgtcaattcrgatgtgttat

SEQ ID NO: 23393 - DNA, 21 bp, Homo sapiens
cttcagagggygaactatttc

SEQ ID NO: 23394 - DNA, 21 bp, Homo sapiens
tgtgttggagrggggtaccca

SEQ ID NO: 23395 - DNA, 21 bp, Homo sapiens
gtaaagactayactagatgcc

SEQ ID NO: 23396 - DNA, 21 bp, Homo sapiens
aataaaacatyattcagtttc

SEQ ID NO: 23397 - DNA, 21 bp, Homo sapiens
tttcctaactraggatgtctt

SEQ ID NO: 23398 - DNA, 21 bp, Homo sapiens
ttggtcaagcrttgtgtttaa

SEQ ID NO: 23399 - DNA, 21 bp, Homo sapiens
gacttgaacaygaataagaat

SEQ ID NO: 23400 - DNA, 21 bp, Homo sapiens
tatgccaagarggagttagaa

SEQ ID NO: 23401 - DNA, 21 bp, Homo sapiens
aatgaggtacrgactctgatt

SEQ ID NO: 23402 - DNA, 21 bp, Homo sapiens
cttcctatgamcttgtttata

SEQ ID NO: 23403 - DNA, 21 bp, Homo sapiens
cagtcttaacracaactaata

SEQ ID NO: 23404 - DNA, 21 bp, Homo sapiens
taataaatgaktatgattgaa

SEQ ID NO: 23405 - DNA, 21 bp, Homo sapiens
actaatccctygttcatgatg

SEQ ID NO: 23406 - DNA, 21 bp, Homo sapiens
cttcgtgccaytctaagttac

SEQ ID NO: 23407 - DNA, 21 bp, Homo sapiens
ataagagcttraggaaagacg

SEQ ID NO: 23408 - DNA, 21 bp, Homo sapiens
aaacatctttyattgtgaatg

SEQ ID NO: 23409 - DNA, 21 bp, Homo sapiens
ttcattaagaragcacaaaca

SEQ ID NO: 23410 - DNA, 21 bp, Homo sapiens
aggaagctctrgatggactgc

SEQ ID NO: 23411 - DNA, 21 bp, Homo sapiens
agaaaatgaakcagaggtaat

SEQ ID NO: 23412 - DNA, 21 bp, Homo sapiens
tcagttttgcmtttgactttc

SEQ ID NO: 23413 - DNA, 21 bp, Homo sapiens
tggagtctggrcaattgcctc

SEQ ID NO: 23414 - DNA, 21 bp, Homo sapiens
ataaattctcycacaatagcc

SEQ ID NO: 23415 - DNA, 21 bp, Homo sapiens
ataaatgtcaytgatgctttc

SEQ ID NO: 23416 - DNA, 21 bp, Homo sapiens
aaaccaaaagrttccatagat

SEQ ID NO: 23417 - DNA, 21 bp, Homo sapiens
agcatttctcytcaactcact

SEQ ID NO: 23418 - DNA, 21 bp, Homo sapiens
agagtcagtgrcagcatgcac

SEQ ID NO: 23419 - DNA, 21 bp, Homo sapiens
cagaggaaacrtatgtccttt

SEQ ID NO: 23420 - DNA, 21 bp, Homo sapiens
ctgtttcatgkttatgcctat

SEQ ID NO: 23421 - DNA, 21 bp, Homo sapiens
gcaaaactcayagagtaggag

SEQ ID NO: 23422 - DNA, 21 bp, Homo sapiens
tgaaaaatgtrtcttacccct

SEQ ID NO: 23423 - DNA, 21 bp, Homo sapiens
gagaagagccmggtttatcgc

SEQ ID NO: 23424 - DNA, 21 bp, Homo sapiens
aaaatacatayatagggtgat

SEQ ID NO: 23425 - DNA, 21 bp, Homo sapiens
gatagaagtgygtagcacatc

SEQ ID NO: 23426 - DNA, 21 bp, Homo sapiens
attctctaagmtctttctctt

SEQ ID NO: 23427 - DNA, 21 bp, Homo sapiens
tttctgtaccyagtttgttga

SEQ ID NO: 23428 - DNA, 21 bp, Homo sapiens
tattatcacamgttacatgtc

SEQ ID NO: 23429 - DNA, 21 bp, Homo sapiens
cttccaagaargcagtgaatg

SEQ ID NO: 23430 - DNA, 21 bp, Homo sapiens
tttcttttccygtgaagatgc

SEQ ID NO: 23431 - DNA, 21 bp, Homo sapiens
tagtgatgtcytcagtagaca

SEQ ID NO: 23432 - DNA, 21 bp, Homo sapiens
atgatcagtgrcaataagaag

SEQ ID NO: 23433 - DNA, 21 bp, Homo sapiens
ttgtggtaggytacacttcgg

SEQ ID NO: 23434 - DNA, 21 bp, Homo sapiens
tggatttaagytgaactatga

SEQ ID NO: 23435 - DNA, 21 bp, Homo sapiens
acaggtgcttrttgtaacaag

SEQ ID NO: 23436 - DNA, 21 bp, Homo sapiens
tctgaatgtaygaaaatcact

SEQ ID NO: 23437 - DNA, 21 bp, Homo sapiens
ttcctgtttcrcaagaggaaa

SEQ ID NO: 23438 - DNA, 21 bp, Homo sapiens
ctattcacccyttgtctcttg

SEQ ID NO: 23439 - DNA, 21 bp, Homo sapiens
aagaatgagarggtattttta

SEQ ID NO: 23440 - DNA, 21 bp, Homo sapiens
ttgtttactgrtaacagccgc

SEQ ID NO: 23441 - DNA, 21 bp, Homo sapiens
tcaccttcacyggctctcttc

SEQ ID NO: 23442 - DNA, 21 bp, Homo sapiens
aattgacctaytaattgagat

SEQ ID NO: 23443 - DNA, 21 bp, Homo sapiens
ggaatatgctrttagatcatc

SEQ ID NO: 23444 - DNA, 21 bp, Homo sapiens
gacaacacacycttccgcttt

SEQ ID NO: 23445 - DNA, 21 bp, Homo sapiens
aaagaatacaytgggtagaag

SEQ ID NO: 23446 - DNA, 21 bp, Homo sapiens
gccaaaacagraaggcgaaga

SEQ ID NO: 23447 - DNA, 21 bp, Homo sapiens
attctcatacrcgagaactct

SEQ ID NO: 23448 - DNA, 21 bp, Homo sapiens
ttgtgcattaracatagtgaa

SEQ ID NO: 23449 - DNA, 21 bp, Homo sapiens
ttctgtacatycaagtacaat

SEQ ID NO: 23450 - DNA, 21 bp, Homo sapiens
gggtctacacrcattgctacg

SEQ ID NO: 23451 - DNA, 21 bp, Homo sapiens
caattctgacyacagccagcc

SEQ ID NO: 23452 - DNA, 21 bp, Homo sapiens
ccaagttgtcyagggtcatct

SEQ ID NO: 23453 - DNA, 21 bp, Homo sapiens
ctctcctcatrttgggacact

SEQ ID NO: 23454 - DNA, 21 bp, Homo sapiens
acccacaatcyaaaggcatat

SEQ ID NO: 23455 - DNA, 21 bp, Homo sapiens
cccaaagtaaygcccgttgaa

SEQ ID NO: 23456 - DNA, 21 bp, Homo sapiens
cctgcaccccmttgcccaatg

SEQ ID NO: 23457 - DNA, 21 bp, Homo sapiens
taatccctcaycctcgctttc

SEQ ID NO: 23458 - DNA, 21 bp, Homo sapiens
tgagaatcacytggtgctatg

SEQ ID NO: 23459 - DNA, 21 bp, Homo sapiens
attctgattaygaaaggaatt

SEQ ID NO: 23460 - DNA, 21 bp, Homo sapiens
cccaagatatrctgccacaca

SEQ ID NO: 23461 - DNA, 21 bp, Homo sapiens
tttcaaatagraatttgaaaa

SEQ ID NO: 23462 - DNA, 21 bp, Homo sapiens
tatacaattcytccttttcca

SEQ ID NO: 23463 - DNA, 21 bp, Homo sapiens
ttgcaggatamatccagcacg

SEQ ID NO: 23464 - DNA, 21 bp, Homo sapiens
tgctacccacrgacaaagaga

SEQ ID NO: 23465 - DNA, 21 bp, Homo sapiens
ccattcccttrtccttgaagt

SEQ ID NO: 23466 - DNA, 21 bp, Homo sapiens
ctcgtagcctrgggaggcaag

SEQ ID NO: 23467 - DNA, 21 bp, Homo sapiens
gcctccttccrctcttcagaa

SEQ ID NO: 23468 - DNA, 21 bp, Homo sapiens
atggttccatrgaaagaaaga

SEQ ID NO: 23469 - DNA, 16 bp, Artificial Sequence
  primer sequence
ttcaccacctcctaaa

SEQ ID NO: 23470 - DNA, 20 bp, Artificial Sequence
  primer sequence
caggaaaggtggaaagtggt

SEQ ID NO: 23471 - DNA, 21 bp, Artificial Sequence
  primer sequence
gggatcagaggcagtctttct

SEQ ID NO: 23472 - DNA, 15 bp, Artificial Sequence
  primer sequence
tcgctggccgtgtga

SEQ ID NO: 23473 - DNA, 23 bp, Artificial Sequence
  primer sequence
agagaatgatgtccctctggtgg

SEQ ID NO: 23474 - DNA, 20 bp, Artificial Sequence
  primer sequence
ctttcagcaccaaacctggg

SEQ ID NO: 23475 - DNA, 23 bp, Artificial Sequence
  primer sequence
tgatccttcctacaggtcagtcc

SEQ ID NO: 23476 - DNA, 20 bp, Artificial Sequence
  primer sequence
cacttctcatacccattgcg

SEQ ID NO: 23477 - DNA, 15 bp, Artificial Sequence
  primer sequence
gcgggacgcgtcttt

SEQ ID NO: 23478 - DNA, 18 bp, Artificial Sequence
  primer sequence
tcctccttgcctttcttg

SEQ ID NO: 23479 - DNA, 19 bp, Artificial Sequence
  primer sequence
ggacacagtgagcgtctgt

SEQ ID NO: 23480 - DNA, 16 bp, Artificial Sequence
  primer sequence
cctggatgggtgcaga

SEQ ID NO: 23481 - DNA, 20 bp, Artificial Sequence
  primer sequence
attctgcaagaaaggcaagg

SEQ ID NO: 23482 - DNA, 18 bp, Artificial Sequence
  primer sequence
acaggtacaaccaagcta

SEQ ID NO: 23483 - DNA, 19 bp, Artificial Sequence
  primer sequence
gtggggcttgacaccactt

SEQ ID NO: 23484 - DNA, 21 bp, Artificial Sequence
  primer sequence
gcagctgcatacaatgtgagc

SEQ ID NO: 23485 - DNA, 20 bp, Artificial Sequence
  primer sequence
gatttggataaggtggagcc

SEQ ID NO: 23486 - DNA, 23 bp, Artificial Sequence
  primer sequence
ttctaacagctttatggagaggg

SEQ ID NO: 23487 - DNA, 23 bp, Artificial Sequence
  primer sequence
gaccattctgaaggtttctcttt

SEQ ID NO: 23488 - DNA, 22 bp, Artificial Sequence
  primer sequence
ctgaatatgaggaaagtttggg

SEQ ID NO: 23489 - DNA, 20 bp, Artificial Sequence
  primer sequence
tcctttggtgaatcaccagg

SEQ ID NO: 23490 - DNA, 17 bp, Artificial Sequence
  primer sequence
agagcggctcccagttc

SEQ ID NO: 23491 - DNA, 17 bp, Artificial Sequence
  primer sequence
tctgaaatattggttcc

SEQ ID NO: 23492 - DNA, 16 bp, Artificial Sequence
  primer sequence
gctttggcagctgtgc

SEQ ID NO: 23493 - DNA, 20 bp, Artificial Sequence
  primer sequence
tttacaacctgggcatcaag

SEQ ID NO: 23494 - DNA, 15 bp, Artificial Sequence
  primer sequence
tgatcaggaaagcaa

SEQ ID NO: 23495 - DNA, 20 bp, Artificial Sequence
  primer sequence
aacagtcagtggagcatgga

SEQ ID NO: 23496 - DNA, 23 bp, Artificial Sequence
  primer sequence
tcacctgaaagaaccattcttag

SEQ ID NO: 23497 - DNA, 16 bp, Artificial Sequence
  primer sequence
agcctgagcaaggata

SEQ ID NO: 23498 - DNA, 19 bp, Artificial Sequence
  primer sequence
tactgggcaagaaaaacat

SEQ ID NO: 23499 - DNA, 19 bp, Artificial Sequence
  primer sequence
gtaatccaaggttctgact

SEQ ID NO: 23500 - DNA, 17 bp, Artificial Sequence
  primer sequence
cccacgaagggcaggta

SEQ ID NO: 23501 - DNA, 16 bp, Artificial Sequence
  primer sequence
ggggtgtcagcctggt

SEQ ID NO: 23502 - DNA, 22 bp, Artificial Sequence
  primer sequence
ctctggctcctctgctagttcg

SEQ ID NO: 23503 - DNA, 20 bp, Artificial Sequence
  primer sequence
gggcaagctccagaaaaggg

SEQ ID NO: 23504 - DNA, 16 bp, Artificial Sequence
  primer sequence
caatcccgggttgtcc

SEQ ID NO: 23505 - DNA, 19 bp, Artificial Sequence
  primer sequence
aacacagtggccacaatcc

SEQ ID NO: 23506 - DNA, 17 bp, Artificial Sequence
  primer sequence
accctgtcgccagcttc

SEQ ID NO: 23507 - DNA, 17 bp, Artificial Sequence
  primer sequence
tcgtcggatagaatctt

SEQ ID NO: 23508 - DNA, 16 bp, Artificial Sequence
  primer sequence
gaatgggacgcgagag

SEQ ID NO: 23509 - DNA, 20 bp, Artificial Sequence
  primer sequence
gaattaaggaatctatcctc

SEQ ID NO: 23510 - DNA, 16 bp, Artificial Sequence
  primer sequence
gctgttggagagaaag

SEQ ID NO: 23511 - DNA, 20 bp, Artificial Sequence
  primer sequence
gggaatgggaggaacaatct

SEQ ID NO: 23512 - DNA, 21 bp, Artificial Sequence
  primer sequence
cctggtgaagtacatctttgc

SEQ ID NO: 23513 - DNA, 17 bp, Artificial Sequence
  primer sequence
ccagtggtgttgcctga

SEQ ID NO: 23514 - DNA, 21 bp, Artificial Sequence
  primer sequence
cttacaggttgctttccatcc

SEQ ID NO: 23515 - DNA, 23 bp, Artificial Sequence
  primer sequence
aaatcgttaaggaagtcagcact

SEQ ID NO: 23516 - DNA, 23 bp, Artificial Sequence
  primer sequence
ctcatatcacgaatagcaaagcg

SEQ ID NO: 23517 - DNA, 22 bp, Artificial Sequence
  primer sequence
aaataagtgtggactatgcccc

SEQ ID NO: 23518 - DNA, 15 bp, Artificial Sequence
  primer sequence
cccgcgcagaatcag

SEQ ID NO: 23519 - DNA, 16 bp, Artificial Sequence
  primer sequence
aaggcattccttcatt

SEQ ID NO: 23520 - DNA, 23 bp, Artificial Sequence
  primer sequence
cgcccagctgaggatgatatacc

SEQ ID NO: 23521 - DNA, 20 bp, Artificial Sequence
  primer sequence
cgcccccaatttctgtttgc

SEQ ID NO: 23522 - DNA, 17 bp, Artificial Sequence
  primer sequence
ccgcgtctggcttttct

SEQ ID NO: 23523 - DNA, 16 bp, Artificial Sequence
  primer sequence
agccgcaggaggcaca

SEQ ID NO: 23524 - DNA, 20 bp, Artificial Sequence
  primer sequence
ccctcactcccctgacaccc

SEQ ID NO: 23525 - DNA, 20 bp, Artificial Sequence
  primer sequence
gctggagattatgtgccccg

SEQ ID NO: 23526 - DNA, 22 bp, Artificial Sequence
  primer sequence
gtactacttccactgctcctgg

SEQ ID NO: 23527 - DNA, 23 bp, Artificial Sequence
  primer sequence
gctcatttcaggaaggatcatcc

SEQ ID NO: 23528 - DNA, 23 bp, Artificial Sequence
  primer sequence
cttctcagacaagtcactccacc

SEQ ID NO: 23529 - DNA, 24 bp, Artificial Sequence
  primer sequence
gggtgctgaacatcaacaagaagc

SEQ ID NO: 23530 - DNA, 22 bp, Artificial Sequence
  primer sequence
ctctttctaggctctgcggtcc

SEQ ID NO: 23531 - DNA, 22 bp, Artificial Sequence
  primer sequence
cgatgtgggcacttccagctgc

SEQ ID NO: 23532 - DNA, 18 bp, Artificial Sequence
  primer sequence
ttccatgatggttactgg

SEQ ID NO: 23533 - DNA, 18 bp, Artificial Sequence
  primer sequence
cccttcgccaggtacgag

SEQ ID NO: 23534 - DNA, 18 bp, Artificial Sequence
  primer sequence
ggaacagcccctcctcag

SEQ ID NO: 23535 - DNA, 18 bp, Artificial Sequence
  primer sequence
agggaagcacctctttga

SEQ ID NO: 23536 - DNA, 18 bp, Artificial Sequence
  primer sequence
gatctcaaagaggtgctt

SEQ ID NO: 23537 - DNA, 18 bp, Artificial Sequence
  primer sequence
agcatcatgaagaactgg

SEQ ID NO: 23538 - DNA, 20 bp, Artificial Sequence
  primer sequence
gtcgtaggtgtccttggtgg

SEQ ID NO: 23539 - DNA, 21 bp, Artificial Sequence
  primer sequence
gacgaagagaggagtacgatg

SEQ ID NO: 23540 - DNA, 21 bp, Artificial Sequence
  primer sequence
cactctcaggaacaaggcagt

SEQ ID NO: 23541 - DNA, 18 bp, Artificial Sequence
  primer sequence
acaagatgaagtggaagg

SEQ ID NO: 23542 - DNA, 20 bp, Artificial Sequence
  primer sequence
atttcaagggcagttgcttt

SEQ ID NO: 23543 - DNA, 17 bp, Artificial Sequence
  primer sequence
gtaccgcagcgtcgtgt

SEQ ID NO: 23544 - DNA, 20 bp, Artificial Sequence
  primer sequence
tccagatcattcgagctgtg

SEQ ID NO: 23545 - DNA, 19 bp, Artificial Sequence
  primer sequence
ccatttgatggaactatgg

SEQ ID NO: 23546 - DNA, 20 bp, Artificial Sequence
  primer sequence
atagttccatcaaatggtgt

SEQ ID NO: 23547 - DNA, 20 bp, Artificial Sequence
  primer sequence
tggacttgtctgatcccaag

SEQ ID NO: 23548 - DNA, 17 bp, Artificial Sequence
  primer sequence
ttggcagcaaagttttt

SEQ ID NO: 23549 - DNA, 19 bp, Artificial Sequence
  primer sequence
acttggaggtccagattcc

SEQ ID NO: 23550 - DNA, 17 bp, Artificial Sequence
  primer sequence
gggcagtgggtcataga

SEQ ID NO: 23551 - DNA, 18 bp, Artificial Sequence
  primer sequence
ggctacgtggctgacctg

SEQ ID NO: 23552 - DNA, 19 bp, Artificial Sequence
  primer sequence
ggatgtagtaagtgtctcc

SEQ ID NO: 23553 - DNA, 18 bp, Artificial Sequence
  primer sequence
ttcttccacgccgttgtt

SEQ ID NO: 23554 - DNA, 16 bp, Artificial Sequence
  primer sequence
cagctgtttcaggtca

SEQ ID NO: 23555 - DNA, 20 bp, Artificial Sequence
  primer sequence
attcaaggggtcctgctgtg

SEQ ID NO: 23556 - DNA, 16 bp, Artificial Sequence
  primer sequence
agccacggtccacacc

SEQ ID NO: 23557 - DNA, 18 bp, Artificial Sequence
  primer sequence
gacaccctgccctccagt

SEQ ID NO: 23558 - DNA, 15 bp, Artificial Sequence
  primer sequence
ttccgccagggcttg

SEQ ID NO: 23559 - DNA, 18 bp, Artificial Sequence
  primer sequence
tggaaattgtgggcatga

SEQ ID NO: 23560 - DNA, 20 bp, Artificial Sequence
  primer sequence
cctctgacttgatgctgaac

SEQ ID NO: 23561 - DNA, 20 bp, Artificial Sequence
  primer sequence
atcaggcagaaatggatctg

SEQ ID NO: 23562 - DNA, 18 bp, Artificial Sequence
  primer sequence
aagctgcagcgacatgaa

SEQ ID NO: 23563 - DNA, 20 bp, Artificial Sequence
  primer sequence
tcaggctgaaagaactgtgg

SEQ ID NO: 23564 - DNA, 21 bp, Artificial Sequence
  primer sequence
ggccatcaaggagtagttgtt

SEQ ID NO: 23565 - DNA, 16 bp, Artificial Sequence
  primer sequence
gaagggagtgaaatgc

SEQ ID NO: 23566 - DNA, 16 bp, Artificial Sequence
  primer sequence
tctggttgctttatcc

SEQ ID NO: 23567 - DNA, 24 bp, Artificial Sequence
  primer sequence
tcttctgtgtcagtattagctgta

SEQ ID NO: 23568 - DNA, 16 bp, Artificial Sequence
  primer sequence
aatggctgctactctg

SEQ ID NO: 23569 - DNA, 19 bp, Artificial Sequence
  primer sequence
ctccaggccttcactgtgc

SEQ ID NO: 23570 - DNA, 16 bp, Artificial Sequence
  primer sequence
gataagcctcaagcat

SEQ ID NO: 23571 - DNA, 19 bp, Artificial Sequence
  primer sequence
ctgcagccagtgtatgtca

SEQ ID NO: 23572 - DNA, 17 bp, Artificial Sequence
  primer sequence
ctccatgtctggggttg

SEQ ID NO: 23573 - DNA, 17 bp, Artificial Sequence
  primer sequence
cttcaacctctctttga

SEQ ID NO: 23574 - DNA, 16 bp, Artificial Sequence
  primer sequence
ttcccaagggtgacat

SEQ ID NO: 23575 - DNA, 19 bp, Artificial Sequence
  primer sequence
cagagcaaggtggtgaata

SEQ ID NO: 23576 - DNA, 17 bp, Artificial Sequence
  primer sequence
taccaggagaatgtgac

SEQ ID NO: 23577 - DNA, 19 bp, Artificial Sequence
  primer sequence
agcctccaatcccagattc

SEQ ID NO: 23578 - DNA, 17 bp, Artificial Sequence
  primer sequence
acacgtggtacattctc

SEQ ID NO: 23579 - DNA, 21 bp, Artificial Sequence
  primer sequence
tctaaaccactagccccaatg

SEQ ID NO: 23580 - DNA, 19 bp, Artificial Sequence
  primer sequence
tccccaaggtgtcatcctc

SEQ ID NO: 23581 - DNA, 16 bp, Artificial Sequence
  primer sequence
ccagcacagtcatgga

SEQ ID NO: 23582 - DNA, 17 bp, Artificial Sequence
  primer sequence
agggtctggctatctct

SEQ ID NO: 23583 - DNA, 20 bp, Artificial Sequence
  primer sequence
ttcaaaacccctaaatatcc

SEQ ID NO: 23584 - DNA, 18 bp, Artificial Sequence
  primer sequence
caacaacttctcatcgtg

SEQ ID NO: 23585 - DNA, 22 bp, Artificial Sequence
  primer sequence
cactaccgggattgagatacaa

SEQ ID NO: 23586 - DNA, 18 bp, Artificial Sequence
  primer sequence
tcctggttaaattcaagg

SEQ ID NO: 23587 - DNA, 17 bp, Artificial Sequence
  primer sequence
ccctgcatgggtgacag

SEQ ID NO: 23588 - DNA, 20 bp, Artificial Sequence
  primer sequence
taaggcagagccaagctcgt

SEQ ID NO: 23589 - DNA, 18 bp, Artificial Sequence
  primer sequence
gcggggtgcatcttctct

SEQ ID NO: 23590 - DNA, 16 bp, Artificial Sequence
  primer sequence
catgccatgagacttt

SEQ ID NO: 23591 - DNA, 20 bp, Artificial Sequence
  primer sequence
ggtagactggccttgattgc

SEQ ID NO: 23592 - DNA, 19 bp, Artificial Sequence
  primer sequence
actacctagaaacacccta

SEQ ID NO: 23593 - DNA, 19 bp, Artificial Sequence
  primer sequence
gcgtaaatccacctaattt

SEQ ID NO: 23594 - DNA, 17 bp, Artificial Sequence
  primer sequence
gcaggcgagatccgtca

SEQ ID NO: 23595 - DNA, 20 bp, Artificial Sequence
  primer sequence
agtactgcccgttgccacta

SEQ ID NO: 23596 - DNA, 17 bp, Artificial Sequence
  primer sequence
gggacgtgtcgctgtga

SEQ ID NO: 23597 - DNA, 16 bp, Artificial Sequence
  primer sequence
tccattgctgttgcac

SEQ ID NO: 23598 - DNA, 15 bp, Artificial Sequence
  primer sequence
gtgcaacagcaatgg

SEQ ID NO: 23599 - DNA, 19 bp, Artificial Sequence
  primer sequence
gggatccatgcagtcaatg

SEQ ID NO: 23600 - DNA, 20 bp, Artificial Sequence
  primer sequence
cgtgtttggacctgactctg

SEQ ID NO: 23601 - DNA, 18 bp, Artificial Sequence
  primer sequence
ttccccgtttcccttgta

SEQ ID NO: 23602 - DNA, 18 bp, Artificial Sequence
  primer sequence
gttgcaatggtcaagctg

SEQ ID NO: 23603 - DNA, 20 bp, Artificial Sequence
  primer sequence
atccgttgcaaggtagtatc

SEQ ID NO: 23604 - DNA, 16 bp, Artificial Sequence
  primer sequence
ggcaggacggtggaca

SEQ ID NO: 23605 - DNA, 16 bp, Artificial Sequence
  primer sequence
gcgccacttgctgctg

SEQ ID NO: 23606 - DNA, 20 bp, Artificial Sequence
  primer sequence
tcctgcctctcttcgcttcg

SEQ ID NO: 23607 - DNA, 20 bp, Artificial Sequence
  primer sequence
tgaaggccagaaacggatgg

SEQ ID NO: 23608 - DNA, 18 bp, Artificial Sequence
  primer sequence
tccgtttctggccttcac

SEQ ID NO: 23609 - DNA, 16 bp, Artificial Sequence
  primer sequence
tggctggcagaaagtc

SEQ ID NO: 23610 - DNA, 22 bp, Artificial Sequence
  primer sequence
gagagacagtggacagtattgg

SEQ ID NO: 23611 - DNA, 16 bp, Artificial Sequence
  primer sequence
aggcgctgcccactct

SEQ ID NO: 23612 - DNA, 19 bp, Artificial Sequence
  primer sequence
atgttgaaacccggcatgt

SEQ ID NO: 23613 - DNA, 19 bp, Artificial Sequence
  primer sequence
accgccacaggagatcaat

SEQ ID NO: 23614 - DNA, 18 bp, Artificial Sequence
  primer sequence
cgtctgtggcaagtgcag

SEQ ID NO: 23615 - DNA, 16 bp, Artificial Sequence
  primer sequence
ctgggagagtcatcaa

SEQ ID NO: 23616 - DNA, 20 bp, Artificial Sequence
  primer sequence
cgctgctaacaagggaagga

SEQ ID NO: 23617 - DNA, 17 bp, Artificial Sequence
  primer sequence
ctggctgtggtggttcg

SEQ ID NO: 23618 - DNA, 18 bp, Artificial Sequence
  primer sequence
caggggtgttttggaggt

SEQ ID NO: 23619 - DNA, 18 bp, Artificial Sequence
  primer sequence
cccgtccagacgttccat

SEQ ID NO: 23620 - DNA, 18 bp, Artificial Sequence
  primer sequence
gaacgccggagcatacag

SEQ ID NO: 23621 - DNA, 17 bp, Artificial Sequence
  primer sequence
gtccattcccactgcac

SEQ ID NO: 23622 - DNA, 18 bp, Artificial Sequence
  primer sequence
ctgtgaagagggctggac

SEQ ID NO: 23623 - DNA, 20 bp, Artificial Sequence
  primer sequence
agggtccaaacaatccacca

SEQ ID NO: 23624 - DNA, 18 bp, Artificial Sequence
  primer sequence
atgtcctagcgggcacca

SEQ ID NO: 23625 - DNA, 19 bp, Artificial Sequence
  primer sequence
tttcgatcatagtcaatgg

SEQ ID NO: 23626 - DNA, 17 bp, Artificial Sequence
  primer sequence
ctgatcattagcgttgc

SEQ ID NO: 23627 - DNA, 18 bp, Artificial Sequence
  primer sequence
cgactggctgtggtggtt

SEQ ID NO: 23628 - DNA, 17 bp, Artificial Sequence
  primer sequence
ctctgcagctgcgatcc

SEQ ID NO: 23629 - DNA, 17 bp, Artificial Sequence
  primer sequence
ttacaggtcccgtgctc

SEQ ID NO: 23630 - DNA, 21 bp, Artificial Sequence
  primer sequence
accgctctttgaccagaggac

SEQ ID NO: 23631 - DNA, 21 bp, Artificial Sequence
  primer sequence
atccccatgtcggagcagtag

SEQ ID NO: 23632 - DNA, 20 bp, Artificial Sequence
  primer sequence
ggatgtctccagaacacgcc

SEQ ID NO: 23633 - DNA, 20 bp, Artificial Sequence
  primer sequence
ttcaattgtgccagcaacgc

SEQ ID NO: 23634 - DNA, 20 bp, Artificial Sequence
  primer sequence
cgaactgggcatctgtgagc

SEQ ID NO: 23635 - DNA, 20 bp, Artificial Sequence
  primer sequence
tggcagctaactggtggagg

SEQ ID NO: 23636 - DNA, 23 bp, Artificial Sequence
  primer sequence
gtttcccaaagttgatctcttcc

SEQ ID NO: 23637 - DNA, 22 bp, Artificial Sequence
  primer sequence
atgttgttctggctaatcatcc

SEQ ID NO: 23638 - DNA, 21 bp, Homo sapiens
agtgaatataytgtctcccag
